United States Patent Application Publication US 2026/0275333 A1 - sequence listing, part 16

SEQ ID NO: 3045 - RNA, 64444167 nt, Homo sapiens (residues 32,222,086-34,370,224 of 64,444,167)
  source 1..64444167: mol_type = mRNA
tcaggagttcaagaccaacctggccaacatggtgaaaccctgtctctaccaaaaataccaaaaaaaatttagccgtgcatggtggcacacacctgtaatccaagctactcaggaggccaaggcaggagaatcacttgaacctgggaggcggaggttgcagtgagcggagatcctgccactgcactctagcttgggtgacagagtgagacttcgcctcaaaaaaagagaaaaagaatcaggcttccatctctttgttcagccatccagtattagcttttctatcacctcatgggccaagatggcagatgaagctccagccatcacatcccaactggaggaacaaaagttgcgaaagggcatgtcctccctttttaagaagccttcccggaagtccattataacccttttgcttacatctcattggctagtacgagggcacatgggccatacctagctgcaagaagtacttagaaatgtctgtctttctttttctttcccccacctcgcccggggtatgtttggctgataagaagtgtctttattttaggctgccacgtatccagctgaaaactgggttcgagggaaagaggataagaggtatttcttctttaccacgtgatttctgaggatccttccagctctgctcgttctgagcctgtgaatagcctggcacagctctaattcagctgacgcttactgcacattgactattggaaggcaatgcaccatcgtgccaaaccattctcaggtataatggtccaggaatttgagcgcatggcttgtcattctcccaggctgccacctccctgtgggaaccagaatgagactggaagagtgagagggagccagccatgcagagagctggagggaaaggcagtccttcatggcagggacatccagaacaaagccctgccttgttcatgtccctgggtcttctgcactcaatatgggtttcatccactggtggtcccacagatacatactggacacataaatggatgctgtatacagagaagtcctagtttgttggagaatctcagcagcacaggcatggtggtgaagaatcccagaggttcactgggcccagcagcaggaaagccagctgacttcagctggatagcaagaggcaaagggcctgaccaagggtgagcagtcaccgggaggtggtgctggtcaagattttctttccagccaagatccctgttcccccctcattctttccagacagcgctgtcttacctcaccaaaagtaagtgagcagatcagccttagcctcttgctgcttgttgggtctgagctgatgttgtcccactgggacagctctttgctggtccagatccaggtagaggggacacacattccaagtctggaattcaccgaaggttggctgcaggtgctttccaagaggtcggggggtggcagggggccgcagatcctggttttatcctgatattccagccccactgggagatctactctggctttcctttgaaaatccttttgaggtagcatctgaaagattagctgaagacctggcctatagtagctactcaggtaatatgaattccttccttctctaacccctgacagcctgatcgggtctttctggtgaggtccccaaatctttctcatttattctaaaaatatttatcatgcctaccatgtgataaggtccatgctggggctgggaatcagaagattaagccacagactcagctcattgtcaagggtgggggagatgggagtaaggggtagtagttaagaacataggatctggagcacactgcctggatttaaatcctggctccaccaattcctagctgtgcaaccttgggcacgttacttaacctctgtgcctcagtttcctcacctgtaaaatgagaatgacagtaatacttcccttacagagctcttgtgaaaatcaaatgacttaatatacacaaacaattggagcattgcctatcacataatgaggcccaataaacaatgcacaattatgtacatataaacaaaactggagtctaggccaggcgcggtggctcacgcctgtaatcccaacactttgggaggctgaggcgggcggatcttctgaggtcaggagtttgagaccagcctgggcaacatggcgaaaacccgtctctactaaaaatacaaaaattagccgggcatggtggcacgtgcctgtaatcccagctacgcaggaggctgaggtaagagaatcacttgaacctgggaggcggaggttgcagtgaaccaagatcacgccgctgcactccagcctgggtgacagagcaagactccatctcaaaaaaaaaaggaaagaaaactagagtctagcaagataagtgtcgcacagctggaccatcaaggaacactttcttgtcactggtccgaggcctgtgtaagtgacacaggccttggatagcgtatgtgggagcaatggcaaacaggctgcttgggtccccagcctcaccagctgacagttccatgggcagggaaagtggctgcagggcatatcattgtgcagaaggcagcaagagaagtgggacagggaacactccctaaggaggtgaggcttgggaattgcgactgaccttggaggtgtggaaggtgtttgctgagcaagcagtctctgttgggtgtggagaatgagtggcatgtctgtcacagcactgttgtgtgagggaaagattggaacgacctcactgtctagcaagagggaaataggtaggtaaattgcagtttatttgtacaaaatggaaaacttttagagaagctaatacaaccacatgatccacatgatcaacatggccaagtctctgaaacataaagttgaatttttagaaagttgattagatttatatgtaacctttaactaggttacatgcaatgtgatgatgataagagctagaattctttgagagctttctgtgtgccaaggtactgttctaaatgctttgctttgataatacattaatcctctcagtagccctataaatggatatattaattagcttggctgtactattcatttaactacatacatgtagatcaaaatatcatattgtatatcgtaaatatatacaacctttttttattttttatttttattattattttttgagacggagtcttgctctgttgcccaggctggagtgcagtggcacgatctcagctcactgcaagctctgtctcacaggttcgccattctcctgcctcagcctcccaagtagctgggattacaggtgcccaccacgacgtgtggctaattttttgtatttttagtagagacggggtttcgccgtgttagccaggatggtctcgatctcccgacctcgtgatccacctaccttggcttcccaaagttctaggattacaggcgtgagccaccgcgcccggtcaacttttttaaattttttttgagacaaggtctcaccctcccaccctggctggagtgcagtggcacgatcatggctgactgcagcctcaaccttccaggctcaagcgattttcccatgtagcctcctaggtagctgagaccacaggcacacaccacaacacttggctaattttttgatatttttggatagatggggtgttgccatgttgccccaggctggtcttgaactcctgggctcaagtgatctgcccacctcagcctcccaaagtgctgggattacagaagtggccaccacacccaaccacaattgaaaaaaaacaaaaacaacaacaaaaaaacagctttatgatgtgggaactgttatctctattatgtggatgaggagctaaggcacagagtggtaaagtcacctgcccaagttagctagtggcatagtcaacattggaacaaagcattctggcttaacctacaatcttcatcattccactccatagaaagcacgcagaagaacactcccctcctttttgatgtctatagtaaaagtgcaatcatacattaaaacacattaccctctgggaaggatgatggcaggatgagcttgtatttaggtgtgtgttttttgttttgtttgttttgttttgtttttaaacctgaaacaaagcaaagttagtttctgctgatttgggtcatgggtatataaattattaaattattttctgtatttgcctggatggtttgaaatatttcatagtttttatttgaaattttcattgaggtcattgtacatttacatgcagttgtaagaaataagacagcaacctcccatgtaccctttacccaatttcccccaatggtaacattttgcaaaactatagtacagtatcacaaccaggatattgacattgatacaatttacccatcttactcagttttcttgtacttacttctgagtgtgtgagtgcatgcctgtgtgtgtgtgtgtgtgtgtgtgtgtatttctgtgcagttttatcgtgtgtgggtttatgtatccactactatagttaatacactgaacagttccattatcacaaggatccttgtgttgccagtttataaccacacccacctccctaaacatatacaccccattcctaacctctgccaactactaatctcttctccatgctattgttttaaaatgtttatataaatggaaccatacaatacataacctttgagattgcccaccctccctgacccaaggataattcccttgacatcatccaaattgttgcctgtattgatactgtgttcctttttttggtggggttcatattccatgatacagaggtacagcagtttgtttaactgtttacttgtgagtgacgtctgggttgtttccagttgggggctattttatgaataaagctgcaagggacattggtgtataggcttgtgtgaacataagttttcatttttcttgaataaatgcctaagagtacaattgctgggtcatgtaactgcatgcctaactgccaaactgttttccagaatggctgttcccatttcatacttttaaggaaaggattttggctggcagaaggcacttcccccctccagctggagggaagaagtatacagagatctagaacttgaaagtgcattgtgaacatggaacagcaaggggtttcgtgctgctgagaggtagtctgggtttagctgaagagggaacacaggtttgctcctcatttgttcagtcaagaagtattgaccgggcgcggtggcccacacctgtaatcccaacactgggaggcctaagtaggcagatcacttgagtccaggagttcgagaccagcctgggcaacatggcgaaaccccgtctctacaaaaaaaatgtaaaaaattagctgggcctggtggcacttatctgtagtcccagctactcaggaggctgagatgggaaggtcttgccttgagcctggaggcggagattgcagtgagccgagatcacgccactgccctccagcctgggtgacacctgggtgacagcaagatcctatctcaaaaaagaaaaagaaaagaaaaatatttaccaagctcttgggtgtgccagacactattctgcgcatactggagcactgccttcccacagcaaggacagaggtgaaataattatgagatggactgtgtatgagggggaagcaggggcttgggagggcatgataggggcacctgcagacccctgctcccttccatagcgcagggactatgcctgtcttgttttcctccaggtcccaatacatagtaggcaatcaataaatgttttttaaatgttgaatgaatgattcaaatccagtatacatagtccctgtgagtgtgacctggccgttgcttctgtaagcagctgcatgtcccagtcctgccatgtaggtaaaagggcaaaggcttggtccagacaccccaccctggaatgaattactgcaccgcagattggaagccagtgtgacatataaaaggttggaatgctctcctgtaaagttttaattgttcgacaagcaaagagggttgtaaattccatgtggcgggacagtattgcatattgtgcctgttgccgccgccaccaaggttccttatcagcccgttggtatttcacaacctctcgtgtttcttgcgtgttgcaggggcccctccgcagggtctctggggcatggtgcaacaccatcctttttcccgtgggggtggcagccaggctctctgtgcgtcctctgacttccctcattccatctcctgtctagattttctccaaaggaacatccggtgcttgccctgccaggagccccagcccagttccccgtcctagaggaacacaggccactacagaagtacatggtatggtcagacgaaatggtgaagacgggagaggcccagattcatgcccaccttgtccggccctatgtgggcattcatctgcgcattggctctgactgggtaacttcccccttcctctctcactggctaacttggatgtgtccctgagcatggccctggcctgtagggatcggccccgcgtcccagccagagcagagatctctcacttgttctggttcgtgggattgtgtcccatcatcccactgcagcacatatcaaaatgtaactccagagtgcctgccagccaggtctcactttagcagcagctgtttttatcctcattttacagatggataaactgagagatcaagccagaccccaggtcaggcagcaagccataaagaggccacagtccaggagtcccctgtcctagctcagtgtctggctggtagactccgtgttgaaaaactgactgtggagatgaggcatggctcccaagaaatgaagatgtcatcctaacagaatttggaggctgtttaaatgtgcagaatccttgtattccaatgaggttttcacctctgtgtgaaaataacagaatcaatatagatggtcaccttgatttacctaagaagatatatagatatgttagaaatgctcattgcagaaaacttgaaaaatactaaaattaaaattcactcatagccaattgatgaggtaatcttacatttacccactaaactctcctctttcccccagcccccacaaagaaagggagccagagccaggatgtcttatgagtggctccaaccagacattcaaggaatagtaattcccatctatactttcctacaacatcaagagatataagattctattttttataaagctagcataacactaataccaaactcagataaggtcagctcagaaaattatagcctgttcttgcttatgaacacaaatgcataggccctaagtgaaatattaacaggtcaaagccaataacatattagcacacaacacaaaacacgtaaaaatctatcgcaagaatgtaatcaaatttactatattaacacccaaagaagaaaaatcatatgatcatctcaatagaggccaagaaagcatttgataaaagtcaccacctgttcatgataaaaactcataactaaccaggaatagaatggacccaccttaacttgataaaggctatctctcgaaaccacagcagatagcatacctcctggggagctattggaagtgttcccactgtagttgggaatcatataaggctgcccgttagtactgccactgttcagaattcagtgaatgtcccagataatgcagtaagaccaagaaaagtaatttttgtttcaaaatgccaggctttctgtgctgtgcccaccgcccagaaagaaccactgttaactcctcctccttcaatgcttttttttttgagacagagtctcactccattgccgaggctggagtgcagtggcaagcaaaatcacagttcaccgcatcctccaccttctgggctcaggtggtggtcctcccacctcagcctcctgggtagctgagaccacaggcgcacatcaccacacctggctaatttttgtattttttgtagagatggggttttgccacgttgcccagactggtctccaattcctgagctcaagctatcagcctgcctcggcctcccaagatgctgggattacaggtgcgaggcactgcgcctggtcctcagtgttttctttaaaaatgtagttaggctgggcgtggtggctcatgcctgtaatcccagcactcagggaggccgaggcaggcggatcacgaggtcaggagatcaagaccatcctggctaacgtggtgaaaccccgtctctactaaaaatacaaaaaattagctgggcgtggtggtgggcacctgtagtcccagctacttgggaggctgaggcaggagaatggcgtgaacccaggaggtggagcttgcagcgagcagagatcacaccactgcactccagcctgggcgacagagcaagactccctctcaaaaaaaaaaaaaaaaaatgtagttaggccaggcacggctgctcatgcctgtaatctcagcactttgggaggccaaggtgggtgggtcacctgaggtcaggagttcaagaccagcctggccaacatggcaaaactccatctctactaaaaatacaaaaagtagccgggcatggtggcgggtgcctgtagttccagctactcgggaggctgaggcaggagaattgcttgaaccccagaggcggaggttgcagtgagtggagatcacaccactgcactccagcctgggtgacagagtgagactccgtctcaaaaaaaaaaaaaaaatgtagttaggttcttcctgtatagcctgtctttttccacttaccaggtcttgcttctggggttccagggcagttgccagtatttaaccctgttccccgctctccgtagaagaacgcctgtgccatgctgaaggacgggactgcaggctcgcacttcatggcctctccgcagtgtgtgggctacagccgcagcacagcggcccccctcacgatgactatgtgcctgcctgacctgaaggagatccagagggctgtgaagctctgggtgaggtcgctggatgcccagtcggtctacgttgctactgattccgagagttatgtgcctgagctccaacagctcttcaaagggaaggtatgtgtgggccaagtgggagtgcagtaggaagggaatgaaaggaggagccaggatggtcccactgcccactgcatgcttcacgggctcccctacaagccttttgcctggacctaccattcctcttcagttcctaccctccttcaaaccccagctcagaggcctcctccgtagtctttccaggttttcatccactcctggagctcacgtatccctgctgggaccttcgtggccctatatcatttcttctctcgggcactttctggactgtatgagactggtgtagaaatatgtcttatttcctcccaggagctgtgggctccttgaaggcagggtccaaggctgactcactgttaacattccttgatgtctagcctggtgcttcgacctctttgggactgaaaccctgccttaccatcaccagtgtctagtacagtgcctgacacttagtaggcagtcagtttgttgaatgaggatgtagagagtgggctctggggagagatccagtatagtggaggagttaatagcagagactctggagtcagagaacttgaatttacccactctgcagccttgaaaaagttatttgacctctctgtgcttctgtttcctcatctataaaatgggactgaatagtacctatctcatagggcagttgtgaaggtcagatgtaaagaaattgaaacagttcctgctacaaaataagtgctcaataaagttagctatcatcagtagtagaaattggtggctgatgaatgaaggaaaggatctttgtgcttagcaaactgttgaagaagccgtgaatagtgagtattcagtacatgagtaaatactagaatgttcttggtcagtgcttactatatcagtgaagagtaatactcaggcaatgagtgagtacgtattgataaaatgactgaattagtattaagcattccataggactttgtaggatgagtgaaaaccgtaaatgctgtgcaggccttaagaggcagacactgggtaccgctggctttatatcaagggcctccccttctctttcaccccagacacaggaagctccagtgcagagaggaagtgctaagtcagcacattctaatctcctccccacctactgaacagaaaatcagagctggggctgggcacagtggctcatgcctgtaatcccaggccaaggcaggagaattgcttgaggccagaagttcgagaccagcctggcctaacatagcgagacccccatctctatttaaaaaaaagaaagaaagaaagaaagaaaagcagaagaaaaatataattaagagaaaatcagagctgagagatctcaggggttgtctaacccaacccctctattttatagctgaggaaaccaaaattccaagaaaggatagagtttacccaagcagtcccagagctaattataatgggcatgacacagagtgggtaagtttcagaatgtgagtggaattgtttgggggattttggccatgattaaactggtattatttctttgctacaatccagatagcaagatgatgatttttgttacatcagaaatctctgtggaacagcaaagcactttcagccccaactctgcccacattccccccacctacctacaacccccaactacctctatactaagctgaagcatttggagagtcccagggagtttttttgtgagtttttggagtcagtgtatctgttacaccttgaacctcttgccattttctatttcctgtccctatgccagtcttctcatccctccccacccctcaactcccttctccatgggttcagaggccacctttatcctgaactaagccttcctcctccattaagctggtccagtgctgagtaagggtaccagtaaataagatgtggtcccgctctccagggctcacattctagacccaggaaaagagactgcagagagctataacgtgggccacaaggtggattcaggagcttgctagagagatgggcaggtccattcattcacctgtccactcaccagatttttactggggcaggctctgtgctgggcctggccagcagtggagagcaaaccaacacagctctagccccagtcaggggcaggagatgatgctaatcagagaatcactaaggagtggaaactataagcagagatgtgtgctccaaagtagagcagcagggttctgtgagagtgaagagcagaggatgctggcctaggctagagggccagggagcgcttccccaaggaggcaccactgaagccgagatgcgaaggagaactaggagctaaccaggtaaagggaggtacaccccaaacagcacagcacgcacaaaggtcctgaggagggcgggagcctgggtaggggctggatgatgggggtgggataagaagaggcccagcgaggaccttgtaggccacgttcacaatttgtcacccttatctgaagggcaatagggcatcattaaagggtgttccacttggagggcgggaaggacaggtgtgaggttatctcgaaaagtttcttctggctgctctgtggtgagcagaccaggagaggcagtgaggggaccagggagaggctgttgcagtccatcaggcaagagattgtgatgattgggcccaaggagtggccctccctcaagagaagggctcacctttggggaatatctcaggggtagattggacggaccttgggcttggatttggggtacatgggagatggaggcatccagcccagaattggaaggtgtggagctctctgttcccctctctggtttggtggggaagtccaccaggccagggctttaggaaaaatagaatttgagcttagccttaagagtctggtcaggccaagcacagtggctcacacctgtaatcccagctatttgggaggctgaggcaggaggatcacttgaatctcagagttcaagaccagcctgagcaacatagcaagactcctcctctaaaaaaattgttttaaattaaccacgtgtggtggtgcacacttgtagtcccagctacttgggaggctgaggtgggagattgcttgagcctgggaggttaagacccacctgggcagtatagcaaaagcccatctcaaaaaattaataaaataaaagagtctggtcggtattttaatgggtgttgaagcagcattccaggcagagggaacagcacaagtgaagacatgaaggtgtgaatggtgtgtttggagctgaggctcctggagcccggaagggtggggtgggcctaggcagcagctgggcaatgcttccctcagacactgaaccacatcttcctcttctctgcccctccttttgtgtctgtaactgcagctcagggaataaggttgggggtgtggatggcaggccttggcctgtagccaccccagcttatatgctctgtgcttcttcctgcaggtgaaggtggtgagcctgaagcctgaggtggcccaggtcgacctgtacatcctcggccaagccgaccactttattggcaactgtgtctcctccttcactgcctttgtgaagcgggagcgggacctccaggggaggccgtcttctttcttcggcatggacaggccccctaagctgcgggacgagttctgattctggccggagcaccagaccctctgatcctggagggaccagagtctgagctggtccttccagccaggcctggcagccagaggtgctccgggattgcaaactcctcttctcacctgccaaagatggagaagagtgccagggacccctcaaggagggagacgctccatatcccagggcataggacttgcaggttcctaggagcaggagcatctcccatcgcacgtgctttctgctcttctgggaatttctcacactggcaaagcagtccagcctccgtcttctggtccactctgctctgagcagcctgggatgctgaactcttcagagagatttttttatagagagatttctataattttgatacaaggtcatgactatcctagaactctctgtggtttttgaaaatcattgaattctattaatgtaggtacctaaagtgaccttaactgaatgtggatgaggctggggctggtgtgggtcttttggctgcttttcaaggtgtcccccaatgtggccctcaagagccatccccactgcctggccagagccattgttgtcccctacttcctaggccatttctggggcttgggggatgaatgctgtcctgtgctgtaaacactatgcaaatggaagttatcggttgtggtgctgtgcagcgctctgtgggcgactaagtgccactcacgcagcatgttcctggcaaggagcacataccatcaagccacactatcatggtattgttctcacagtcttttggtggttgatggccactgcaaacctggcaccatcagatctcttctgatctcttgccccagtggggcctggttggtagaatgttggcattcggttgatatccaaagcctgttctcccagccgtcctcctgcagctggagccttcaggccgtattctcacgagggaacgtttgccaaggctctgacctcacagaagatgcccagggcccagaagccatcagaattatcagtggagaagcaccttttgactcttcccttccaatgtaatctctgccaacaccatgaggcttaaggtgctctaagtcatgagtgttttggtctcaaatgctgcagttttaataatctgtgactcctgagagcccatggttttttgaccttgtggttctaaaattccttgtctgacccctgtagatcttttccttgccatgtcacctcccttggcctttgatcctggaaaggtggcagagcctccactgagccaggcccagagctccttgcagtgccttcttccttgtttacctgtgggaggaaacactttttttgtcaggggcagcctggttcagagctcagaggtcacactgtatcaaagatctcaaacagcaaagtcagcatttgctgtatagagctgccacccaactctaagcaggagaaactgtacagaaagggctttgctatttttcccttttgggaaaacaatgaagtgttttaagtcctgggtggactgagagatggtttgcctgtccagacttgctctcaagcctcatccagagaaggagctgcagatgagggagcccgtacactccctgccaccactaggttgtaagcctgtagctggctggctgatttcattttggaattcatttgccatccacagccttacactaggcacacactttagagtctggggctccagtggggcccgcctaattttttttccccccaagacagggccttgctctgtctcccaggctggagtgcagtggcatgatcatggcttactgcagccttgatctcccaggctcaagcgatccttctgcctcagcctctctggtagctgagactgcatgcccagctccaaatcaccttgattcatatcagcagtaataatcacttgtgttctgaaagaaagggcaccagaagttctagcaaaattcagttgtgttctgtgagctagcactttttcctctgacccaattttcttacctataaaatggtgataaaaaccgacaggttgttcaaaggcccagatcagctaaagcatgtatataagagcacgttgtaaacttgaaagagacaaaggcacaaatgtggctgttgattaatttgactgcttctcgttgctcgtcacctccatgccaggcactgtgcttgctaattgctttatgggggcattctcttatttattccccagccctgggaaataggagctgtcattatccttctctttctgcacaaggaaaaattaatgccctgagaattgtcataattttcccaaggctgcccagctggtggtgttaagccagaatttgacctcccagagccagtttccattagctgccatgctctgctgcctctaattcacagaatgcactttctaccctgtgtgccatggagacctcctatggaaaaatgatcagccaccttaccttctactgggtacctgctgtgagtctgcctatgccagaaggattaaggaggggaggttacccaagaaacaaagcctacatgccgcttacagcccccgttggatggttgctcagtacaacagtcttgcattcagcaggtgtttgttcatcacctactatgtgtcaggctctatgctaggtactggggatacaggagagaatcaagcgtaaagtctttgttctcaaggaatttgcattctagaaagtagaagatgtaataaatgtactgtgggacatgttaataagtgctataaagaaatataaagggtttgggagcaaaaagagggagtggatctattttagatgagcccaggtaagacctctctgaagagctgtcatgaaggagggagggagcacattcctggcagagaaaacagcacgtgcaaaggccccgagactggagtgtgttcctgaagagcagccaggaggccagcatggctggagaggcaggcataggcagggaaccgagcagcaggtcagagcaggcgagctgacattctgcagcctggacggccatggcaggaagcttttagttggagagatacaggaagcctcctagggttctgagcagaagaggggcatgagctgattcacattctgaaggacctctctagctggccagtgctgaggaggttggagagagaaagggtgaaagcagagagaccagtgcagggctgttaacagggttgcaggcgagagactggggtgctgggctcccctagactaggactccagtgccctcctctcccaagagacaaaggccattgcattgaaggaggtgggaaatgattagattctgaacatatgtaattatttttcagtctttttcaaagatacaaatatttacatagttttaatcatgtaatatatacaatttaatgtcctagtgttttacttaatagtgtatcatgttttccctgttggtatgtagcctggataaatgctcttaattataaaaaattctgtcgaggagtgttccatagtttattgttttcctattatgagaatttaggccaagtgtggtggctcatgcctgtaatcccagcactttgcgaggccgaggtgggcagatcacttgaggtgaggagttcaagaccagcctggccaacatggtgaattatctctactaaaaatacaaaaaaataataataatagccaggcgtggtggcacatgcctgtattcccagctgcttgggaggctgaggcaggagaatggcttgaacctgggaggtggaggttgcagtgagccgagatggtgccactgcattccagcctgggcaacagagcgagactccatctcaaaaaaaaggagacttcatgtgcccccaatttttcactattgttatttgaaaaaatatttttatttgtaagagtttttctttatttaaaatgttcattaataaagttgttggacgggaagcaaaaaaaaaaagttgtttaagataaattcccagaagtgaatttgttagatcaaacacttaaaactttttgttatggaagaattcaaatataaataaaaaattgtgagtaataaaatgaactcacagtttcaacaatgacccacattttaccagtctagttgcattgactctcccacacccaagtctgtttgctagagtcttcaagaaaacctaaatgtgttttgaaagaagagccaacaggatttgctgacatgctgaatgtggactgggaaggaaagaggagcccagggtgctccaagatttagggcccaggcaccagggagttgtccctgacttgcagagtgaccttgaagcaaatcccttcacctccgcattcctcacctcagcattacaggtgctaatggtctaggcagtgcttcccaaagggtggtcttcagaggttccttccagggctggttgatatggcagattcccaggagccaccctgaacctgagaatcagaatgtctcgggggtagtgcccaggaatctgccttttcacaagcacctgcaagtgatttggatgcccagtggcccaagacctgaaactgtggtcgtcagaccagcggcatcagcatcacctgggggaacttgctagaaatgcagaatcccaggcccccgcccagaaccactgagtcaggatctctggggacgcagcccaggaatctcttaagctctcttggggctaaaacttgagcaacactgatctgaaggaagtggggatctcactgtgtggtcattcagcccacggtaatggaagacctctgcagcccctccctggcaagcctcacgggttccaccaggcatggtcaacaaggtggctttaggaactgcctgctgcccagtttgtactgacctacatctcctattgtatatttgtaggggctttacaaccagatgatcaaatctcattgttttacggtcagcccaaatttatatataagaaaaggaagggaagcctgggcgcagtggctcactcccatcatcctagcattttgggaggttgacacaggccaatcgcttgagcccaggagttcgagaccagtctgggtaacatagggaaaccccgtctctacaaaaaaatgcaaaaattagccaggcatgtggcatgcatctgtagtcccagctactcgggaggctgaggtgggaggatcacttgagcccaggaggaggtcgaggctacagtgagctgtgatggcaccactgcactccagcctggacattggagtgggaccctgtctcaaaagagaggaaaaaaaaaagggaattcaatttttcaaaattaaaagggaattccatttttcaaaatctgcatctgattggatagagaaatggagaagctggtgttcaaaggaaccaaagctggaaacactgtcctgaaacattgtagatctccagacatttggaagggaggggagagagaataagaaaataaagaagaaagaggagaaaggacagagggaggaagaaagagttgagttctcatttctattttctgttcaaagaagctcagcaaataatctattaatagtaactacaacaaaaataataataagctttcactggcctgaaaataaagatccttcctctcctcagttctccttctgtccttagtggaattgacagaaaaaacccatagcctgaaggcaaatcctgcactctggattatgttgtcaaagtgaattcaaattcttgcttgaaacctggtttatttcagggttgagacctttcccttgaaataacattatttaagggcaagcaggtttggtttgtttttacatctaatcctttattgatcatcagcccaggatgccaagcataaccaggtaaacagtgagaatggaagaaacagaaggcatttcccagaaaccccattcctcaagtgcagtgactcagaacaatgcccacctgggggcagcaccccggggaggataccccacccctctgaaaaatccacctttgcaaaaaaattggcaacacattgatccatttgatattcatctcctccagtgtgggggatgttttcccctctctgacactgcacaagctggtttaggaggtcctgggcaggcactggcagaaggcaagaattatcttttcagtttttctcaatcctgctaacaatgcccaaagagaaagtctcagttcagtgctattgtgtcattaactcctctctactgcttgctaataatctgtccttgtaacagagtagacctcagagtcagacaatcttagttttctggaatttagtaacactattactaagtaaataaatgaattatttatttatttatttatttatttattgagacaggttctcactcttgcccaggatggagtacagtggcttgatcttggctcactgcagcctcaacctcccaggctcaagccattctttcacctcagcctcccaagcagctgggatcacaggcacgcaccactgcaccagctaacttttgtatttttagtacagatggggtttcgctgtgttgcccaggctggtctcgaactcctggcctcaagggatcctcctgcctcagcttcccaaagtgctgggattacagtgagccaccgtgccctgccattttatttatttttgatcctttgtacttgtgtttttctgtttaaagatgtgatttaaagtttccttttaagaaacttaggttacaaaaagtgagttggttcagagaaaaagtattaagtagatggtgtggcatgaattatgaagataaagtttgggagatccttactcggctggcccctgaagatagctcaaaacaatacccaaggggcttttgtgagagaaactctcctcacttttcacacctccgcactattgtctaagcttttgctctgcttaaaacatatcgtaaatgtttcaagattctatgaaattctccttttctgagctcccatagaaccttgaaattgtaataataagtaacatgggctgggcacagtggcccacgcctgtaatcccagcagtttgggaggctgaggcaggtggatcgcttgagcccaggagttcgagaccaccctgagcaacaaagtgagacccgcccccccctccatctctaccaaaagtcaaaaaattagccaggcatggtggcaagtgcctatggttccagctactcaggaggctgaggtgggaggatcacttgagcccaagaggttacagtgagccatgtttgtgccactgcactccagcctgggacagagggagaccctgtctcagataataagtaacatgtattaaatgactaacatatgtcatttaccatgtgctacagtgttctaagcactttacttcaattaactcgcctcattagagaatatccctaagaggctgcttttcttattatctccatgttacagataagagcactgagaagcagtgaggtgaagcacccagcttaaggttgtagagcctgtgagtggaagagctgggacttgggccctagaagcatggcacacgagtcagtgccccaaagccacgcattgtgctgcctctgatgtcatgttacccatcagaccaaattatttgctaacttgtttccccagctggaccagaagtgtcccccaggaatagggaccatgcctgatgcatctcccaacatcagcgcctagcccagtgcttggtttataaaagtgtcctaaatttatggccgggcatggtggctcacgcctgtaatcccagcactttgggaggccgaggtgggcggatcacctgaggtcaagagttcaagaccagcctggccaccgtggggaaactctgtctctactaaaaatacaaaaattaggccaggcgtggtggctcacgcctgtaatccctgcactttggaaggccaaggcgggcagatcacctgaggtcgggagttcgagactagcctgaccaacatggagaaaccccgtctccactaaaaatacaaaattagctgggcgtggtagtgaatgcctgtaatcccagctatttgggaaggctgaggcaggagaatcgcttgaatctgggaggtggaggttgcggtgagccgagatcacgccattgcactccaacctgggcaacaagagcgaaactccatctcaaaaaaataaaaaaagaaaatacaaaaattagccaggcatggtggcaggccctgtaatcccagctacttgggaggctgaggcaggagaattgcttgaacctgggaggcagaggttacagtaagccaggatcacgccactgcactccagcctgggcaacagagcaagactctctcaaaaaaaaaaaaaaaaaagaatatatatatatatatatatatattcactcattcaacccatatatgtgtatgtgtacatatacgtctggcatcatggagggttcgtggaggagataggagtcgagtcaaatgctgggtatgattttaacagccacacatgggagataagaaaaggaattatagatggagggattgcgtgaacaaaggtgctgacccaggtgttgagagctaagtctgtggggagcagcaagcagtgctggccataggtttagggaggtggagacaagagatgaggcagcatcaggaggtttgagccatgtgagaaggctctggaatgccaaactaagaggtttggtccttacccttggggatcttaaccagaagttgtctcaggattagaggcaaatacatggggtaagggtacgagcaggggctttgcagggctcactaagggccctgaggcatcataggagtgaaagggtcctcatagtgccccttgagggcaatgccaaaaggcaggactttggctgcataaattagtcaaaaatgtaatgacaataaattcatgtacagggtgaaaaattcaaaaagttcaaaataatatacctgtagtgtgaaaaataagtgcccccttgctagcgcaaaccccactccagaggcaaacactgctcaaagtttcatggccaggtgtggtggctcacgcctgtaatcccagcactttaggaggtggaggcaggtggatcacttgagatcaggagttggagatcagcctggccaaaatggcaaaacccagtctctactaaaagtacaaaagtcttggatttgtgcactttgatttctgtcctggtgctacagtgtgctggctatacacagtctgggagacttggcttcaaatcccagcccagtcactaactcaagtcattgtgggactcaaacaagtcactagcctgtctgaacctcagtttttgcatctacaatacagaaataggcctagcgtggtggctcatgcctttaatcccagtattttgggaggctgagtcaggagaatcacttgagaccaagaaatcaagaacagcctgagcaatatggcaaaactcccatcaatacaaaataaaaattaaaaatttagccaggtgtggtgctgtgtgcctgtggtcccagctacttaggtggctgaggcaggaggatcacttgagcccaggaggcagatgctgtagtgagctgtgatggtgctaccgcactccagcctgggcaacagagcaagactgcatctaaaaaaaaaatacacacgcacacacacacacagatatagatatagatatagatatagatagatataaataatattgccacagtacctgatacatagtagatggttgataataaaagtgtgttattatttagtgaaattgcataacctttctgaaattcagattcttcagctaggaaccagcagttggcatgaggctgtcagagagattccaaagttcatgaaaatgttttgcaagtcttaggagggcctcaaatatgaaggattaagcattatgggggctctggcaaccctgccaggcattgcctgctataagtttcctttacatctccctctggcttttaaatgttgtgtttgcttacagtgagaccattttctcccagctgctgccggtaagcgaacaggaactctgagcactttgcctgctggggagatgggctggcaggagaaaccccctcccacctccaaggggttaggcttctggggagtagggcttggagggagttaaggacccaggccaatgatgtaggggcagagaatggggagaggcagagaactgcctctttgcaacaggccctggccttccgtgaactcttgcctcctctgcaactgtaaaatgagggctttggaactgagtcaccctttggaaagggcattaggtttggagtgtaagggcgcgggtgcaaggcctagctttaaaattaatccggagtgtaattatgagactcagtgttctcatctgtaaaatgagaatacaaattaagccattgaaccattatgaattaagtcttcctcccatggtactggcattctagtggggaagaaacagataagaaataaataacgaaacattagctggggccaggcttatgtctgtaatctcagcactttgggaggccaaggtggaaggatggcttgagcccaagagttgagaccagcctggcaatgtgagaaaaccctgtctctaccaaaagaaagaaaaaaaaaagaacaaacgaaaattagccaggcataatggcacatgcctgtagtcctgtaaaaccaaagatgaggccaggtgcagtgagtcacgcctgtaatcccagcactttaggaggctgaggtgagaggatcacttgagcccaggaggtggaggttgtagtaagccgtgatggcaccattgtactccagcctgggcgacagagcaagaccctgtctcaaaaaacaaaacaacaaaaaaactcagccacactctcatcatccaatacttaaccagttttttttcttttcttttttttttttttttttttgagatagagtctcactccatcacccaggctggagtgcagtggcacaatctcggctcactgcaacctctgcctcccaggttcaactgattctcatgcctcagcctcccaagtagctggagttacaggcatgtgccaccacgcctggctaatttttatatttttaatagagatggattttcaccatgttggccaggctggtctccaactcctggcctcaggtgatctgcccgccttgagctcccaaagtgcggggattacaggcgtgaaccactgtgcccagcccaattaaccacttttattttttaaacaattagctggggcccggcacggtggtcatgcctgtaatcccagcactttgggaggccaaggcaggcggatcacttgaggtcaggagcttgagaccaacctggccaacatggtgaaaccccatctctactaaaactacaaaaattagccgggtgtgatggtgtgtgcctgtaatcccagctgctcgagaggctgaggcaggagaatcacctgaatctgggaggtggaggttgcagtgaggtgagattgtgccactacactccagcctaggcaacagagcaagactccgtcgcaaaataagtaaataaataaaaataaaaaattagccgggcacagtgactcacgcctataatcccagcactttgggaggctgaggctggcagatcatgaggtcaagagattgagaccatcctggacaacatggtgaaaccccgtctctactaaaaatacagaaaagttagctgggtgtggtagtgcgtgcctgtactcccagctactcaggaggctaaggcaggataattgcttgaacctgggaggcagaggtagcagtgagccgagactgcgccactgcactccagcctggcaacagagtgagactctgtccaaaaaaaaaaaaaaaaaaaattagccgggcatagtggtgtacacctgtggtcccaggtacatgggaggctgagctgggaggattgcttgagcctaggaggtcaaggctgcagtgagccatgattgtgccactgcattccagcctggtgacagagaccacatctcaaagaaaaagaaagtatgaggcggtaacgaagactatgaatgagaatgaaatagagtaaagagaaagagagtaactggggtggtcaggggaggcctctgtgttcaggtcacatttgagcagaggcctgaaggaggtgagtgagtgagccatatgggtatctggggaagaccatttcaggtagaaggaacagcaagtgcagaagtcctgaaagggagatgattttggccatagggagcggggcaggaggtgaggtatgacagtgagagaggccagatcataatggacctcacctttggtttttcatgggttctgcctttgtttttgtttttgttttgagatttttatttatttacttattttgtgacggagtcttgctctgttgcctaggctggagtgtggtggcacgatctcagctcactgcaacctccacctcccagattcaggcgattctcctgaatctcccactctgtcatcaaggctggaatgcaggggtacaatcatggcccactacagcctcaacctccaagactcacacgatcctcccaccttagtctcccaagtagctgggactacaggcatgcatgagcatgcctagctaatttttaaatttttgtagagatgaggtctcactatgttgccccgactggtctcgaactcatgggttcaagtgatcctcctgcctcagcctctcaaaatgctggaattacagacgtgactcactgtacccagcctcacctttggttttttgtttgtttgtttgtttgtttgtttttttgggatggagtttcacttttgttgcccaggctggagtgcaatggtgcgatctcggctcaccgcaacctccacctcctgggttcaagcaattctcctgcctcagactcctgagtagctgggattacagacatgcgccaccatgcctggctaattttgtatttttaagtagagacggggtttcaccatgttggtcaggctggcctcgaacttccgacctcaggtgatccgcctgcctcggcctcccaaagtgctgggattacaggcgtgagccatcgcctttggttttatgtgagtgacctgagaaaccattggaaggttttgagcagaggggagtgacatatctgacttaggtttttttttttttttttgagacagagtcttgctctgtcacccaggctggagtgcagcggcgccatctgggctcactgcaagctccgcctcctgggatcatgccattctcctttctcagcctccccagcagctgggactacaggcgcacactgccacgcctggctaatttttttgtatttttaatagagacggggtttcaccgtgttagccaggatgttctcgatctcctgacctcgtgatccgcctgcctcggcctcccaaggtgctgggattacaggtgtgagccaccgtgcctggcctctgacttaggttttatattagttatccgttgctgtataacaaataacccccaaatgtagtgtcttaaaacaagaatcatttattatctttcagtttttgtgggtcagaaatttggaagtagtttggctgagcagttctggctcaggatctctcatgagattgtagtcaaatattggtcagggctacagtcatctgaaggcttgactgtgtctagaggcttcgtttccaaggtggctcactcttatggctggcaagttggggctgactattggccggaggcctctgttcctctccatggggttgctggaaggtctttgcaacatcgtggctgtctacccccagagagtgagtcaagacaccaagacagaagctgcaatgtcttttttttttgagacacagtctctctgtgtcacccaggctggaatgcagtggaatgatcacagttcactgcagccttgacctcctgggctcaagcagtcctcccacctcagcctccacagtagctgggactacaggcacgtaccaccatgcccggctaattttttttttttccagacatagtcttgctctattgccaggctggagtacagtggcacgttctcggctcacggcaacctctgcctcccaggttcaacagcttctcttgcctcaggctcctcagtagctgggactacaggcacacgccaccatgcccaggtaattttttatatttttagtagagacagggtttcgccatgttggccaggatggtctcgatctcttgacctagtgattcacccgccttggcctcccaaagtgctgggattacaggtgtgagccaccgcgcctggccctggctaattaaaaaaaaaaaaaaatctggggtagaggccgggcatggtggctcacgcctgtaatcctagcagtttgggaggctgaggtgggcagattacctgaggtcgggagttcaagaccatcctggctaacatggtgaaaccctgtctctactaaaaatacaaaaaattagccaggtgtggtggcacgcacctgtaatcccagctactctggaggctgaggcaggagaatcacttgaactcgggaggcggaggttgctgtgagccaagatcagaccactgcactccagcctgggctacagagcaagactttgtctcaaaaaaaaaaaaaaaaaaaaaggtttttggtagagatgggatctcaatatgtggtctaggctagtctcgaactcctggcctcaaatgatcctccagcctcagcctcccaaccgggatttataggcatgagccgccatgtcttgccatttttcttgtgaccaagaaaaatggcacaagcctgtgtgcaggctagccctgttcaatatgagaagggcgtaagtacaaggaggaggtgaggtcattgtggaacatcttagaggcaggctaccaaaagttttttatttgtttgttttaattaacatacaatgaaatttacccttttctttcttaattttgacgtaaagatgtataggtctatgaatgttaacatatgagtatatttgcgtaaccactaccacaaacaggatatagaagagttccatcacccctcaaaaaaccctcgtgttcccctttgtagtgacacactcctcctacctcaacctgtggtaactgcagatccatcatgatagttttgtcttttttttttttgagacagagtttcgcttttgttgcccaggctggagtgcagtggcacggtctcagctcactgcagcttctgcctcctgggtttaattgattgtcctgcctcagcctcccagttagctgggattacaggcatgcaacactatgcccagctaattttgtatttttagtagagatggggtttcaccatgttggtcaggctggtctcgaactcctgacctcaagtgatccgcccgcctcagcctcccaaagtgctgggattataggcatgatccaccacgcccggctgatagttttgtcttttagaaaacgtcatagcaatgaaatcattactatgtaaccttttgaaactggcgtctttcactcagaataatgcctttgagattcatctaagttgttgcaggaatcagtaattcatttctttttattgctgaattatgttccagtgtatggataggtcacagtttatcaatttacccattgaagggcttgtttccaatctggggaaattgtgagtagagctgtgtcttggtccatttgggctgctataccaaagcatcatggactaagaggcttataaacaacagaaatttcttgtttacagcttttttttttttttttttgaggcagagtctcgctctgtcgcccaggctggagtgcagtggcgtgatcttggctcactgcaacctccgcctcccaggttcatgccattctcctgcctcagcctcccgagtagctgggactacaggtgcccgccaccacccctggctaatttttagtagagatgtggtttcactgtgttagccaggatggtctcaatctcctgacctcgtgatccacccgcctcggcctcccaaagtgctgggattacaggcgtgagccaccgcgccccaccagggattaggatttcaacaaatgaattttctttttttaatttcttgtcacctaggctggagtgcagcggtgcgatctcggctcactgcagcctctgtctcccaggttcaagccattatccggcctcagcttcccaagtagctgggattacaggctcgccaccaacacacccagcaacattttgtatttttaggagagatggggtttcaccatgttggccaggctggtctggaactcctgaccccaggtgatccacctgcctcagcctcccaaagtgctgggattacaggtgtgagccaccttgcccagccaataaatgaattttttttttttaatttcatggtttgtttttgtttttgtttttgagacaggatcttattctgtcccccaagctggagtgcagtggcatgatctcggctcactgcaacctccgcatcctgggttcaagcaattttcccacctcagcctcccaagtagctgggattacaggcatgcatcaccacacccggctaatttttgtatttttagtagagacggggttttgccatgttggccaggctggtctcaaactcctggcctcaagtgatccacccgcctcaacctcccaaagtgctgggattacaggtgtgagccaccacacccggcaaccattttaaccatttttaagtgtacagttcagtctgttcagaggcattaatacatccacattgttgtgcaaccatcaccactgtctacctatataacattttatcctcccaaactgaaactctggacccattaaacaattattcccatttcttccttggagtttttttgtttgtttgtttgttcatttgtttgtttgtttgttttttagacacagggtcttgctgtgtcccctagactggagtgcagtgatgggatcataactcactgcagactccaactcctgggctcaagggatcctcccacttttccatgtagctaggactactagtatgcacctccatacctgcctaatctttaatattttttgtagaggcagggtcttgctgtgttgcctaggctggtcttgaactcctggcctcaagcaattctcccacctcagcctcccgaagtgctggtggtaattcaatcagtggtcttctgccccagtttgcctgctactcttgactcttcagagccctcagctggctgttccctgggctctgcacagggtttatagctgtcttcagcagcagagacagggaggctttgaatcaatccctctggccatccagcagacagttgactgaagggggcaaggttggaagtaaggagacctgcggggaggtcagaggaggcttcacagaggtgacctctggatcgaatcttaaaagataagtggctgttttcagaagggctagttgtgggtagaccattcaggacagagagatggatctgagtgatgtcttttttttttttttttttttttgagacagagtctcactctgtctaccaggctggagtgcagtggtgcaaccttggctcactgcaacctctgcctcccgggttcaagcgattctcgtgcctcagcctcctgtgtagctggaattacaggcgcgtgacaccatgcccatctaatttttgtatttttagtagagatggggttttaccatgttggccaggctggtcttaaactcctagtctcaaactcctggtctcaagtggtccgcccacctcagcctcccaaagggctgggattacgggtatgagccaccgcgcccggtccctgagtgatgtcgtgaggggcaaaagactgcgaagcctggaaagtaacactttgggttgtctgaagtgaagagggcaaggttgggcaggatgaagggtgagtgccatgagaaaggggccagcgaaatgggctgggactagacgttgagaggtgagtggttgatttctgatttctatggtttgaagaaaaagacccgataacattttccactagtgtagaaggagggggaagcccccacccccagacctgagacaggatgtggggatgcttgtaggtgtctaaggccttggcagggaaggtggcatctaatctggaaaggccaatggcgcagttcctgtggagaaagaagggtgtgcaattttgcagctgctgaaagggattgtcatactgctgcagcctttcttgggttggatgatcaagaagaggggtcaaggggatgtctgcttctgaacccaagagaataaactgaacagttccctagggcttactgtaaatgagatagcagaggtgggagaggatgggagatcaggtgtttaaaggtaggagtgacaaagagtgtttgttgtatcccttttttggtttttgttttctgggttttttttgttttttgttttttgtttgagacaggatctcaacctgtcacccaggctggagtgcagtggcgtggcatgatcttggctcactgtagccctgactcccagggctcgagtgatcctcctacctcagacggctgagtaactgggactgcagggacacaccaccatgcccagctcatttttgtatttgttgttgaatcggggttttgccatgttgcccaggctggtctcaaactcctggattcaagcaatcttcctgcctcagcctgccaaagtgttgggattacaggtgtgagccaccacacccagcttatctctttttatactttttaaatttagtactttagtcatacaagttggagtcagaaaaaaaaggaaaaaaatagtattagttatctattgctgcaaataagttacccttaaactcagcagctaacgacaacatttattatctcacacattttttgaggacaaggaatctggaatcagctttgctgggtgattctggctcagggtctttcatgaggttacagtcaaaatgtcagccagggctgccatcatctgaaggtttgactggggctgcagggtgcacttccaagatgtctcactcgtgtggctgttggctggaggtctcagttcctcactagctgttgaccagaggcctcagttattctccttgtgggcttcttcacagagatgctctcaatttgacagctggcttcacccacaacaagggatccaagagaaagatccaagacagaagctactgtgtcttttataacctaatctcagaagtgtcatataatatcatttcagccatattctattggtcacacaggccagtgctggttccgtgtgggaagagactacacaaggatttgaatacaagtaggtgggggtcattgaaggccatcttcaaagctggtgaccacagcacatgaatgtattaccaattcagattcttttgtgaatataaagatatcactgagacatattattaatagaaagaaggcaagttgcctgcatatatataatctcacttaaaaaagaagcatgaaacctacatatttctattacatacacatataaatatgtagaaaaagattgagaaggatacacttaaaactggtaatggctgggcatggttgcacgcacctgtaattctagcactttgggaggccgaggtgggtggatcacctgaggtcaggagtttgagaccagcctggccaacgtggcaaaacactgtctctactaaaaatacaaaaattagccggacgtgttggcatgctcctgtaatcccagctactcgggaggctgaggcaggagaattgcttgaacctggagggcggaggttgtagtgagccgagattgcgccattgcaacaagagtgaaactccgtctcaaaaacaacaagaacaacaacaaaaactggtaacaatgtcatccctggggagggagatggaatggtaggcatattatgaaaagggaatctaccagggccgggtgtggtggctcgcacctgtaatcccagcattttgggaggccaaggccggcagatcatgaggtcaggagatcgagaccatcctggctaacacggtgaaaccccgtctctactaaaaatacaaaaaattagccaggcgtggcggaggggacctgaagtcccagctactcaggaggctgaggcaggagaatggcatgaacccgggaggtggaggttgtagtgagccaagatcgtgccactgcactccagcctgggtgacagagcaagactccatctcacacacacacacaaaaaagagaagggaacctatctttttttttttttttttgagacagggttacaccctgtcacctagcctggagtgcagtggtgcaatctcagctcaccacaactgctgcctcccaggctcaagtgatcctcccacctcagcctcccaagtaactgagaatacaggcaccactacgcccagctaatttttgtattttttgtagagatggggttttgccatgtttcccaggctggtcacaaactcctgagctcaaggggtctgtccacctcggcctcttgaagtgctgggattacaggcatgagccactgcacctggccaggacagactttttttttttgacggagtctcactctgtcgcccaggctggagcgcaatggcatgatctcagctcactgcaacctccgcctcccaggttcaagtgattctcctgcctcagcctcctcagtagctgggattagaggcacccaccaccacacccaggtaatttttgtgttttcagtagagacagggtttcaccatattggccaggctagtctcaaactcctgacctcaggtgatttgcccacctcagcctcccaaagtgctgggattacaggcgtgagccaccttgccccactggacctatcacttttatattacatatttttcttgatggtttgaatcatttgcaataactgtgttcctgggtaactggtctaattttctgtcgctggatagcaaagcaccccaaacttagtggcatgaaacaacaatccttttattccattcacagattctgtggatcaggaatttgcacaaggcacaacataattggtttgtctctgctccctgatatatggagcctgagctgggagatgacaacagctggtgatgactcacgtttctggtgcctgggtttggatgactagcatgctgggctcagctacagccattgactagaacacctacaaatggcctctcactgtggcctaggcctccttgcagcgtggaagctgtgttccaagagggaatattccagaaagaagcatttggagaaagaatattccaagagaaccaggcagagctgcatgtttatttatgacccaacctcagaagtcacatagcatcacctctgccatactctattggtgaaatcagccacaagccacccagattcaaggaaaggggacatagactcccctccaatgggaggagtgtcaaggaatttgcagccacttctttaaaaactgccacatttagttatagaatttattgtattattttatttttgtagagacatgatctcactgtgtggcccaggctgatcttaaactcctggcctcaagtgatcctcctgcctcagcctcctaaagtgctgggattacggacgtgaaccaccatgcctggccatgggatttaaaaatctattttaggtcgggcacggtggctcatgcctgtaatcccagcactttgggaggccgaggtgggcggatcacttgaggtcaggagttcaaaaccagtctggccaacatggtgaaatgttgtctctactataattacaaaaattagccaggagtggtggtgcacgcctgtaatcccagatacttgggaagctgaggcacgagaatcgcttgaatctgggaggcaaaggttgcagtgagccaagatcgtgccactgcactccagcctgggtgatacagtgagaccctgtctcaaaaaaaacatgtattttaaacaaagggtgagcaataaacattgaggctgcctttcctaagacagtgggttgggagcacctaggcacatgctcatatcccagactcttagctctttctgttttgttgcctttattgctttgagtctgataatctcggagagacctgaggtaacttggcagttgtaacttataattctctttttgtttctcttcagtacctggagccaaaccctttaggtaaatatttacgtatagattcatttgttccccttattcccagaaaagatttgaggaagcttacagggattcatacagtataatcgtatgattaaaaatatataaatagatcaagaaaccaagggaaagggaaaggaaagactgaaacagtaagttgaaaccagaggggaagttagttctcaaaaatatatgctgcaaagtcttaagtaaatatttgtcattgcagggctggaaagcataatgtatgttatctgatctaattacccaactggctcttgaaatccctctctgacatccctacagtagccatctagcctgagtttgcacatttccagtgacggggagatcagtacattgcaaggcaattccaactgttagaaagtatggacccaggagtcacaaattcaaatgcttccaagggctgggcgtggtagctcacacctgtaatcccagcactttgggaggccgaggcaggcggatcacctgagttcaggagttcaagaccagcctggccaacatgatgaaatcccatctctactaaaaatacaaaaactagctgggagtggttgtgtacacctgtaattccagctactcaggaggctgaggcaggagaatcacttgaacctggaaggtggaggttgcagtgagctgagatcgcgccactgcactccagtctgggcaatagaacgagactctgtctcaaaaaaaaaaaaaaaaaaaaaaaccacaaaaaaatccccaaatgctttcaaggaccagatgaatgaggcaggtcaatgtggtggagtgggggctgggggtctaagtcaaagtgcaatgcacacaccccctttaactgtagcaactgctactcctcccagccaattgttgccatatgggacttaggtccagtgtagccagatctttagatatttcaagagaagctgaaaaatcccgattttataggaaatttcccttttttttttgagacagggtctcactgtgtcacccaggctggagtggtggcatgatctcagctcactgcgacttctgtctcccgggctcaagcaatcctcccacttcagcctcctgagtatctgggactacaggtgcacaccactacacctggctaatttctgtagagacaaggttttgccatgttgcccaggtcggtctcaaactcttgagctcaagcgatccacccgccttggcttcccaaagtgctggggttacaggcatgagccactgtgtcaggcaatttcctgggttttaaattggcaattaattctttattttattttatttttgagacagaatctcgctcttttgcccaggttggagtgcagtgacacaatctcggctcactgcaacctccgcctcccaggttcaagtgcttcttccgcctcagcctcccaagtagctgggactacaggtgcccgctgccacactcagctaatttttgtatttttagtactgatggggtttcaccatattggccaggctggtctcgaactcccaacctcgtgatctgcgcgcctcggcctcccaaagtgctggggttacaggcgtgagccattatgcccggcctaattctctagtttataaaacactgaacagcccacaggaaatacaactgcagacctgtgctgtctctggttcacaggcttgtgagtccaaggtggccaaagtctcaggctttaaagctgggttaaaacaggctttgaatctcgctctgcgacttactcattgcataattgtagcctcaattctcatctgtaaaatgggaataataatagcacttacctacctctttttttcctttttcagggacgaagtcttgctctatctctcactgcagcctcaaactcctgggctcaagtgatcctcccacctcagtctcccaagtagccagaactactggtacatgccaccataattgactaatttttaattttttttttttttgtagagacaggctggtctcggactcctgggctcaaaagatcctcccacctcaacctcccaaagtgctgaaattataggtgtggcctggccaacagagcaaaaccgcgtctctactaaaaatacaaaaattagccaggcgttgtgttgcacacctgtaatcccagctattcgtgaggctgaggcagaagaatcacttgaactttggaggcagaggttgcagtgagctgagattgtgccactgcactccagcccaggtgacagaatgataccctgtctcaataaataaataaataatgctaaatattaataactacaataaataaactatttttggctgggcacagtggctcactcctataatcccaacactttttgggagcccaaggcaggtgaattgcttgagcccaggagttcaagaccagcctgggcaacatagggagaccctgtctctacaaaaataccaaaattagctgagtgcggtggtgtgtggctatagtcccagctacttgggaggttgaggtgggaggatagcttgagcctggatgtcaagcctacagtaacctgtgattgtgccactgcactccagcgtgggtgacagagcaagaccctgtctcaaaatcaatcaatcaatcaatcaatcaatcagtaaaataaataaactattttgagggtctctctggagctttcatccagtaattcctgctttacccataaaggcaattttttttttttttagacagagtctcgccgttgcccaggctgaagtgcagtggcgtgatctcagctcactgcaacctccgcctcccaggttcaagcaattctcctgtctcagcctcctgagtagctgggattacaagcgtgtaccaccatacctggctaatttttgtatttttagtagagacaaagtttcaccatgttggtcaggctggtctcaaactcctgacctcaggtgatccacccgccttggccccacaaagtgctggaattacaggcgtgagccaccccacctggcgaagtaattttttttttttttgagacggagtctcgctgtgttgcccaggctggagtggttccatcttggctcactgcaacctccgcctcccgggttcaagtgattctcctgcctcagcctctcgagtagctgggactataggtgcgtgccaccatgcccggctaattttttgtatttctagtagagacagggtttcaccgtgttggccagggtggtcttgatctcctgacctcgtgatccgccggcctcggcctcccaaagtgctgggattacaggtgtgagccaccatgtccggccaaaggtaattttttataagactggttgaggtacgttccaaggtttcagtgactttggtttttgtttttttgtttttgtttttttttgagacagggtctcactctgtcgcccaggctggagtgcagtggtgatctcagctcaccgcaacctccgcctcctgggttcaagtgattctcatgcctcagcctcccaagtagctaggattacaggcatgcaccaccatgcctggctaatttttgtatttttatttttatttatttacttttttgagacagagtctcgcactgtcaccctggctggagtacagtgactatctgatctcggctcactgcaacctccgcctcctggattcaagtgattctcctgcctcagcctcttgagtagctgggattacaggtatgcgccaccacacccagctaattttttttgtatttttagtagagatggggtttcaccatgttggccaggctgatcttgaactcctgacttcgtgattcacccgcctgggcctcccaaagtgctgggattacaggcgtgagccaccacacccggccatttttgtatttttagcagagatggggttggccaggctggtctcgaactcttgacctcaggtgatccacccgcctccgctcccaaagtgctgggattacaggcatgagccaccacgccgggccaggactttgtttttaattattagaagtacagctcacattttccctttaagtgccagaaatacgacattttcctttgtccacaatgcagataaaactcagctgagtgaggatgtctgcaggatcctgcttctttgggatggtgggcaatgaacaactatggacataggtgtgttgtttgtaggtgaagagaggggtttagtggagagggcattctaggtgaggagaaccggtggaacaaagtatttagaggcgggtgagctcctggagcctgatcagagaaaaaagggaaatatcgccaatacttaagttgggcctggtgttgacaggaagacaacctggcctaacctctggaaaatggggagccattagagagatgtaagcagggcagttctgcagaaacacacaaagagggctaaccaagaatgatcacggtttgcaagtcactcactgaatgtgcttctgaaaggactcgtctcaaatcagttatatattgtgtctcttctccagagtctgggagcctccagggacgaggggaataggatatttttcatctctctgtcctagaaacacacccaatatttgcagaggacttgagagaaggggagggactgagctggggtcacctgattgtaggcagaggagagagtgtgagctctgggttacaacctgactctgccacgaggtagctacacaaccttggctagttaatgaactgagcctcagtcttcccatctgtaaggtggggataataatagtacctttgggccgggtgcggtggctcacgcctataattccagcactttgggaggccgaggtgggcagattacctgaggtcaggagttcgagaccagcctggctaacatggtggaaccccgtctctaccaaaaatacaaaaattagctgggcatggcggcgggcgcctgtaatcccagctactctggaggctgaggcaggagaatcgcttgaggtgggaggcggaggttacagtgagccaagatcacaccactgcactccagcctgggcaacaagagtgaaactccatctcaaaaataataataataataataataataataataataataataataataataaaaataatagtaccttcatgatagaatgattacaaagactgatgtgcttaactcataagtgctcaataaatgtccttttggggattttcagctcccccagcagccttccccttggtctccttgccttagcccccaacattgtgtctgtggattatcgtctcccactgccctccaccccttttgctctcaccctttcatttcctgatcccactttcctactggtcaaatatgaaccattgcatgtatttacttctgatgctttttaggaaaagacaaaatgtcacacccagctgaaaaatggaagaatttggtcttgaatccaggtcaagttcatgaactcttataccaccctctgctctttgggtccattacgtactggctgtgagaaatcaagtttctaggtggggcacagtggctcatgcctgcaatctcagcactttgggagtctgaggtgggaggatcactttgagtccaggagtttgagaccagtctggaaaacaaagtgagttcccatttctacagaaaattttataattagccaggtgtggctgtgtgcacctgtagtcccagctactggggaggcttaggtgggagaagtgcttgagccctggaggttgaggctgcagtgatctgtgatcgtgccactgtactccagcctgggcagcagagtgagaccctgtgtcaaaaaaaaaaaaaaaataagtgttcctgtccagctccacagctgtcaatggtagacctgagagccacacttatgtctgcctggctccaaatctggtgattctcccctaccccatgctccccagtctccatgtggaatctttagtggccttttagtggaatcaccatgcttctcctatatggtcattaaatactggagcatttcactatagcgcttgattatcaactgtcacagaaattctgtgaggtcatccagcgggagtcatgcccatttgtggatgaagaaactgaggctcagagagagaaagcgactagtccaagtccacattgactttatatagtcaatattctccacacttccagggtcctagcctagtgaaaactctacaccttaaccactttaaggggtcacatacctcctaaagcattgtccttcacacaattgtttcagtaaatgtttcctgacggattggccacccctgtgtcagatgccagttttctgtagagcctgagtcgtgtgcccaaggcacaggaaatggccttgcttctcagagaaggagaggataagtgaccatatcctgatggaccgtcttgactttccaggtggtgaccattacagggtgatagtcaccatgtccaaatggtggagttgagaatggtggccttcattaagaccacgaacaggccaggcgtggtggctcacacttgtaatcccagcactttgggaggctgaagcagaaggatcacttgaggccaggagttcgaggccagcctggccaacatggcaaaaccacatctctactaaaaatagaaaaattagccaggcgtggcagtgcatgcctgtaatcccagctacttgggaggctgagacacgagaatcccttgaacctggaagtcagagggtgcagtgagccgagactgcaccactgcactccagcttaggtgacagaacgagactctgtctcaaaaaaaaaaaaaaaaaaaaaaaaaaaagaagaccacaacagctgctttattttaacaataaacatgattcctccttactatatacaatttagaaaataggaaaagctgttaagaggaaaataagaatcaactataatctgaatacccaaagataatgaccattgcaaatatttgatgtatttccctctagatttctctgtgccaacacacatgcacacatacttcctattaggtcaaatgtgtgatcataaaaaaactacagtaacatacctgtagcagatgctattgattgcctactcaatacacactctcccttctccctgtttacataactccaatttttttttttgagacagggtttcactgtttcccagactggagtgcagaggcgtgatcacggctcactacagcctcaacctcctgagctcaggtgatcctcccacctcagcctcctgagtagcagggactacaagcgtgagccaccacacccagctgattttaaatttttttgtagagataggatcttgctttgttttccatgctggtctcaaactcgtgggctcaagcaatcctcccacttcagcctcccaaagttctgggattacaggcgtgagccaccttgcccagcagaactctaattttgtttttaggtagtcgtggagttgccttaatcttagagaagatttaacctgtgccaggtgatgaatcacggctggtctagaccagtcatggtaatctgattccccttctagattggattgctgcattgtctaacatggttgtcattacccacgccggtggctttttaaactaatgttaattaaaattaaatcaaatttaaaatgcagtttttctgctgcactagccacattttaagtgtttaagagccatccatggccgggcgtggtggctcatgcctgtaatcccagcactttgggaggctgaggctggcagatcatgaggtcaggagttcgagaccagccttgccaacatggtgaaaccctgtctctactgaaaatacaaaaattcaccgggcatggtgacaggcgactgtaatcccagctacttgggaagctgaggcaggagaattgcttggacccaggaggcggaggttgcagtgagccaagatcatgccattacactccagccttggtgacaagagccagactttgtctcaaaaaacaaaagcaaaaacaaaaacaaacaaaaaatgccatccatgactagtggctaccattttggacaacacagatataggacatttccatcactacagaaagttttattggacagtgctgggggtatgcaagtggtccaattctggccaatgaaacacgagtggtaagtttggggggactcccctacatagatagaaaaaaagagcctcattaggacagaacctctgttcctgcatcttcctgtccaagaccctggtgtgagtatgatgtctagcagccatcttgcaaccacaagataacaagtgcgaggacaaaaagacaaattgtgaggatggcgatggaataggatgaaaataggctgcttctttctttcttttctttcccttttttttttgagatggagttttgctctttcgcccaggctggagtgcagtggtgcaatctcaactcactgcaacctctgctccaccgggttcaagcgattctcctgtctcagcctcctgagtagctagactacaggtgcccgccaccatgccaggctaatttttgtatttttagtagagacaggatttcgccatgttggccaagctggtctcgaactcctgacctcaagtaatccacctgccttggcctcccaaagtgctgcgattacaggcatgagccactgcacccagcctcttttcttttttaaaattgcgtaagggttgggcactgtgattcaagcttgtaatcccaacactttaggaggccgagatgggaggatcgcttgagcccaggaattcaagaccagtctgggcaacatacaaagataaaaaattagctgaacatggtggcacatgcctgtagtcccagctactcaggaggctgaggtgggaggatcgcttgatccctggaggttgaggctgcagtgagcagtgattgtgccactcactgcactccagcctggtacagagctagaccctgtctcaaaaaaattaaaataaaaaataaaattgtggtaaaatacatataaaatataccatattagccctcttttagtgtacggttcagtagtgttaagcacgtttacatgattgtgcagccaatcctcagagctcttttcatcttccaaaactgaaactctgtctccattaaacaatttcccattttctctccccagcacctagcaactaccactctattttctatctccacgaatttgactactctaagtacttcatacaggtgaaatcatgctgtgtttgtccttttgtgactggtttgtttatttatttgtttacatatatatatatatatatatatatatatatatatgtatatatattttttttttttttttttgagacagagtctctccctgtcacccaggctggagtgcaatggtgtgatctcggctcactgcaacctccacctcctgggttcaagcgattctcctgcctcaacctcctcagtagctgggattacaggtgcctgccaccatgcccagctaatttttgtgtttttagtagagacgaggtttcaccatggtagccaggctggtctcgacctcctgacctcgtgatccacctgcctgggcctcccaaagtgctgggattacgggcataagctaccacgcctggctttttttttttgaaacagagtcttgctctgtcacccaggctggagtgcaacggcgtgatctcagctcactgcaaccttcgcctcccaggtttaagcgattctcctgcctcagcctcacgagtagctggggttacaggtgcacaccaccacacccagctagtttttgtatttttagtagagacagtatttcaccatgttggccaggctggtcttgaactcctgacctcaagtgatctgcctgcctgggcctcccaaagttctgggattacaggcatgacccaccgctcccagcccgtgactggtttatttaacataataccctcaagattcatccatgttgtagcatgtgtcagaatctcattcctttttgaagttgaacaatattctattttatgtttatactacattttattatccatttatccgttgagggacaatgggttgcttctaccttttggctattgggaataatgctgctatgaacataggtaaacaaaaatctctttgagaccctgctttcaattctgttgggtatttaaagtggaattgctggatcatataaaaatctatttttagttttttgatgaactaacactgcagcacctctaccattttacatttccaccaacagcgcataaggtttccaatttctccatccttgccaacacgtatttcctgtttttttatttttattttttataataatcatctaatgggtttgaggtgctagctcattgtggtttgatttgcatttccataattagttattttggatatcttttcatgtgtttcatttctttttttttgagagggagtttcactcttgttgcccaggctggagtgcagtggcacgatctctgctggcagcaacctccacctgctgggttcaagtgattctcttgcctcagccccccaagtagctgggattacaggcgcctgccaccatgaccagctaattttgtatttttagtagatgtagggtttcaccatgttggtcaggctggtctcaaactactgacctcaggtgatccccccgccttggcctcccaaagtgctgggattacaggcgtgagccaccacgcctggccgttttttttgccatttctgtagtttctttggagaaatgtctattcaagtccttcgcccattttctattctttatttttttgagacaggcttactctgtcacccaggctggagcacagtgatgcaatcatggctcactgcagccttgacctctcaggatcaaatgattgttatacctcagcctccatgccaggctaatttttttttccttgctttttggtagaggcagagtcttaacacgttgctcaggctgccttgaattcctggtctcatgccatcctcctgccttggcttctaaaagtattgggattacaggtgtgagccaccacacccagcttttgtccgtttttaattgggttgtttatatgtttgttgttgagttgtaggagttatttttgttttttgcagacagagttttgctcttgttgccgggcacgatcttggctcactgcaacctctgcctccagggttcaagcgattctcctgcctcagcctcccaattagctgggattacaggcatgcgccaccatgcctggctagtttttgtattattagtagagatagagttcaccatgttggccaggctggtctcaaactcctaagctcaggtaatctatccccttcccaaagtgctgggattacaggcatgagccaccgcaccaggccagagttccttatagaacctggatattaaccccttaatatatgaattgcaactgttttctcccattccgtgtgttgcctttttaattctgtttattgtataagaaactttcttgaagaccaccatagagcagttaaaaatttttcctaatgagtatagatatccttttactttcttatattttcatgagcatttccccatatcattggatgctattgaaaaatatcatttccctccctcccttccttccttccttccttccttccttccttccttccttcctctctctctctctctttctttctttcttttttttttctttctttctttctttctttctagacagagtcttactctgttgccaggctggagtgcagtggtgcgatctcggctcactgcaacctctgcctcccgggtttaagtgattctcctgcctcagcctcccaagtagctgggactacaggtgtgcaccaccatgcccagctaatttttatatttttagtagagatgggtttttaccatgttggtcggcatgctctcgatcttctgaccttgtgatccacccgccttggcctcccgaagtgctgggattacaggcgtgagacatcgcgcccggctgaaaaatattattttcaatggcagcatgatatttctccttactgacatctcttattctctccattcctctaatatcagacataatatttccctgttgcaagtgaagctgaggtgaacaagcttgtgcctaatctttgcgagtatatctcattattttctcaaaattgattcctagaaatggaatgggctgactcaaatgctttttagtcatcatgattattttatttatttatttatttttgagacggagtcttgctctgtcgcccaggctggagttcagtgacgcaatcttggctcactgcaagctccgcctcccgggttcaagccattctcccgcctcagcctcccgagtagctagggcaacaggcgcctgccaccatgcccggctaatttttttgtatttttagtagagacggggtttcaccgtgttagccaagatggtcttgatctcctgacctcgtgatctgcccgcctcggcctcccaaagtgctgggattacaggcgtgagccactgcacccggccatgatttattttcttacaatttgtggcaatttctcaataccatcagcaatgggatgaaagtgctccttgccaacattgtgtatgatgctttttctctctctctctctttttttaagccaaggtctcactctgtcacccaggctggagtgcagtggcacaatcatggctcactcagccttgacctcctgggctccagcaatcatcctgccttagcctccccagtagctgagactacaggcatgtgccaccacacctggctaatttttaaattttgttgtagagattggggactcactatgttatccaggctgctctcaatctcctgggctcaagcaatcctcctgtcttggccttccaaagtgctgggattataggtgtgaacaactgagcccagccaagtatgatgctttaaaaaaaaatctgctaatttgagaagtaaatgatgataatatattttttttgtttgtttttgagacagggtctcactccattacccaggctaaagtgcaggggcatgatcttggctcactgcagcctcaaactcctaggctcaaaggatcctcttgcctcagcctcccaaatagctgggactataggcatgcaccaccagctaatttttttttttttttttttgaaacagagtcttgctctgttgcccaggctggagtgcaacagcgtgatctcggcgcactgcaacctccgccttccgggttcaagcaattctcctgcctcagcctcccgagtagctgggattataggcacccaccaccacacctggctaatttttttgtatttttagtagagacagggtttcaccgtgttagccaggacggtcttgatctcctgacctcataatccacctgccttggcctcccaaagtgctgggattataggcgtgaaccaccacgcctgactgctaattttttaattttaatttttagggatgaagtctctctacattgcccaggctggtctcaaactcctggtgtcaggggatcctcccaccttgggcccccaggatgctgggattacaagcatgaattacctcgcctgtcaaatacatgtttttaaataagtgtactgcgtgcagtgcaccagccactgtgctaagcacagaggatacaaataagtaacataaaacccggtcctgggacctaggtggtagttttggtctgtcaagggattttatgacctcctcctggctctaagactttaatatcactgttttcttggccaggcacagtggctcacgcctgcaatcccagcattttgggaggccgaggcaggtggatcatttgaggtcaaggagttcgagaccaggctgaccaccatggtgaaaccccatctctactaaaaatacaaaaaaaaaaaaaaaattagctggccatggtggcacatgcctgtaatctcagctactagggaggctggggcaggagaatcgcttgaactcgggagacggaggttgcagtgagccgagaccatgccactgcactccagcctaggcgaaagagcaagactgtgtctcaaaaaaataaaaaaaaaaagagtattgttttctttatttcagtattactatgtatgggccttacaaatgggaaagcatttcacacccattccctgggtaaaccctcacagcagccctgagggaagcaggcagggaaacgaggtcctgagggtgaactcacttgcccaagatcacacagccagttaagtgcctgaggaggaagcaattagcagccaactcctgtctggctttcttcagaaaacatcaaagatgtgaatttagaagccattagcttgatcctcagcccttagagcctccctgaggtcccagagttccatccattctgaacctgggcactccgccaagtgagaagcatcaagcacagctcaggtgcttggcttcagtccaagccctacatcttgtttcttcctgaaaggggcgctgggatgtcacctccttgcattctaataaatagttccctttgcagtctttttatacaacccctcttcagccctcctccccaaatggtattaaatttccaggaatactgaactctctcaccagcatgacttctcacatttacagtgattgctttgctggagggcaccatgactccactgataaagaaaggaaagacagccaccattcatggagaacgtactaagtgcatcttttttttttttttttttttttttttttttttttttttttttgagacagaatcttgctctgttgcccaggctggagtgcagtggtgtgatctcagctgattgcagcctcaacttcctgggctcaagcaatcctcccatatcaaccttctgagtagctggggctacaggtgtgcaccaccatgaccggctaatttttgtattttttgtagacacagggttttgccatgttgcccaggctgatcttaaacatctaagcttaagcagtccaccggccttggcctccctaattacaggcgtgagccactgtgcccagccccagaccatattttagttaatcctcacaacaaacctaagcagttgcatttctagctccactttgcatatgagaaatgtgagtcccagagaggtcaagtgatgtgcactgggtcactcagctaacacataaggaatggagctgggattcaaacctttgactgtctggaccccgcagtccatgcttgtcattttcatagctcagagatgcactgtccaatgtgataaccactagctgcatgtggctgcttaggcataaattaattaaaattaaataaatacaattcagtttttcagtagcactagactcatttcaagtgctcaatagccacatgtggctgttggctgccttattggacagcacagatatagaacatgtccaccacggtggaaagatctgttggacagcgctgctctcaaatgtgagagaagaaagaaaacatcgtgattttacccttgcatggggagccaggccatctgccacttgtcagctttgtagagagttcatcggaagttatttttcctggatgagatcataataaaaccatccatgggtgtctgggctatgttttacctttctcctggtttggcctccattcatccccatccatgatagatgcaagcatgccctttcccacactcccctgctgccacccagtcgccaggtatctagtgcctttctctgtcatacaggatttgggttatcttagtcactaaagtggggcatcctcacaggacaactcagatggagactgagcaaaattttataacacagtgggcttaattccagctgggtggtccctgggcgacatgcctgccactggggaggagggtcctcactgactgacgttgaggaggagggctaacggagtttcttggcaaaggggatgtctggttataaagggattcttccccccgcttagcaacagaaccccctccctatgtctggggactccttactttgtgaacggaaggcagtcttcttcctaccatagaagccaaaaggtcagatgtttgtctttacagcttccactgcaggtaggagatgggcatgtgatcaaggatcaaccaattaaggcttgggttatagaggtcgagactgtggggaatccttatggagagggaaggtgagaatggtcttgagacagtgcccatggccaggtagccatggtgaaagcagggcaactagtgttctcaccatacaagtccagtagtacatggtcccacgtggcctcgcctttcttattagtggccacttctagaaacttcctggtgattttgtggccttcctactaccctgctaataaattccttttctgctaccatcagaattggtttctattatttatgatatctattattatgataaactgacacaatggtgctcgctggaattagatcatttctaggctagagtttgctcttggggaggtaggaaggaggatctctgctctggtccatgtgatctctccaggaccctttttttccagccccactggcctccttcctctttttgcatcctcaccatctctccccttcattgaactgagcaaatctccagaattgagaggtttggaagccctactctgacttttcaaaacttctttcattccctgagtctcctccccaagattctggggctcagaaagtcctttctctatttttctactgaaataactcttttctgagcaataaatacctcacagtccaggttagatggaaaagaggacacagtatggaaaggaaatgccaggagtggaaacatacttggtaatatagaagttaccccatcatactagggtgaccactcatcctagtttgcctggactaaggagtttcttgggacatggaacttttggtgctaaaacagggacagacctgtgcaaactagaacaagttagtcaccctacaactgtacagctactactactaatcccacttcaatacacagctttattcagcttgctaaggacagaatcaagaccagaccgtcatcaacaatgccttaccaaagttcttttttcggccaggtgcagtgagtgggtcatgcctgcaatcccagcactttgggaggctgaggcaggtggatcacttgaggtcaggaattcgagaccagcctggtcaacatggcgaaaccctgcctctactgaaaaatacaaaaatgagccaggcatggtggcacatgtctgtaatcccagctactcaggaggctgaggcatgagaatcacttaaacccgggaggtagaggttgcagtgagctgagattgcgccacagcactccagcctgggcaacagagcaatattctgtctcaaaaaaaaaaaaagttgttttaattttcatttctttaatatgagtaagcataagtatctttccttttcctatgtttaaaagcaatattttctattccttttctctgaactatctgttcataccttttacctacctgtttaaaaaaatttttaaatagtttttgtacatatttatggggtacatgtgcaattttgttacatgcatagaatgtgtaatgataaagtcagggtatttaggttatctatcacccaagtatttatcatttctatgtgttgggtacatttcaggtcttctagctgttttgaagaacacaatacatttttgttaaatagcagtaaacacatccagttaaacatagtggattgatgatgcgtatttatttttttctccctcgaaccccatctatatggcaataaggaataaaaaatgtattaacccagaacatgaataggaatgaaaaggagacattagtggcccagggatttcagcaagtttttagaaaacagggacagaaggggaagtagtaactgacttaacagggggaggaagttatgacccaaatgtctgcagggaatattgatttgatgactaaaaggtgagcccagattcttccatagaagagatagacactaaaaataaagatatggatggaaatctcccacagagtagaacaaaagagccaaaaagagggacaataagagaaaaacagagaaaattagaaactcagtttggaaagtataacttctgactaagagaaattccagaaagagaaaaaaatggaggggagagccaagtctggtgtctcattcctgtagtcccaacagtttgggaggccgaggcagggggattgcttgagcccaggagtttgagaccagctgggcaacacagtgagaccccatttctacaaaaaatagaaaaattactcaggcatggtggtatgcacctgtagtcctagctactcgggaggctgaggtggcaggatcacttgaagctgcagtgagccatgatcatgccactgcattccagcctgtgcaacatagcacaacactgtttcaggggaaaaaaaaataggaggggagaaaattatcgaaaaaataatacaagaaaatttcctagattagagggatataagtctccagattgaaaaggcccagctaacacaagtgaggaaaagcctcactgaggggagtcatcatcaaatacaacattatggataaagatgatagcctaaaagttttcaaagattaaaaataaaaaaagaacaagacacatataaagcaacaggattaagaatggcattagatgtcttaaatctggatactagaaacaataatgcaatgttttaaaaattctgagagaaataattttcagcctagatttcttttttttttttttttttgaaatggaggctccctctgtcgctcaggctggagtgcagtggtgcaatcttggcttactgcaacctctgcctcctgggttcaagtgattatcctgcctcagcctccccgagtagctgggactacaggcatgtgccaccatgcccagctaatgttttttttgtatttttagtagagacaaggtttcagcatgttggccaggctggtctcaaacacttgacctcaggtgatctgcctgcctcgacctcccaaagtgctgggattacaggcataagacatggcgcctggccttcagcctagatttctataccctgctaaactattaatcaagtgtgaaaacagtataaatgcatatttagacatacaaggactaaatatatttgcttctttgcaacctttctcaggaatctacagaaagatgtgctgcacagagatgacagagtaaatccacaatctagaagtttgagacacaaggtccagggcacagggaatcccaaccaggtgtaggatataggaaagttcagtatgacagctgtgcagtaggcctggagagcactggtccagatcagagctgaagccttcaggagaaaaaaacaaaagagaactcatgaactttttttttttttttaagttgttgttgtttttgtgagatggagttttgctcttgtcacccaagctagagtgcaatagggttatttcgggtcactgcaacctccacctcctaggttcaagcaattctcctgcctcagcctccaaagtagtggggattacaggtgcctgccaccactcctggctgatttttgtatttttagtagagacgtggtttctccatgttggccaggctggtcttgaactcctgacctcagggtgatctgcctgcctcagcctcccaaggtgctgggattatgggcatgagccaccatgcctagccgaattgttatgttacacatctggaaaaatcactgctgattattttgtctaatttattaaccacataggaaaaaattaacaatatctgcaaagaaagctaatgaaaggggggaaaaaatgaggcaattattagcttcaggaaataccaaaagaggctgggtgcagtctcttttggtatttcctttattattttatttaaaaataaacttcttcactgtagagaaagtgtaaatcaaattatgtgggagttttaatgggccaggcctgagaatagcacacatcacatttaattggccagaacttggtctgaactgtaaggaaggctgggaaatactgtctagttgtgtgtccaggagcaggaagaaataacgtttttgagaggaagtagcaatatctgccacaacaggcaaaaagtagttgtaggcagatgaagaagaccatctcaggtattcatttattcaaggagcaaaacatatttgttcagcaactactattgactaagcttggttccaggcatggtggatacaagagtgaacaaataaaagactgctcttatgcagtttctatttagtggggaacagcaggtgtaagttccatgggggttggaacctgcccttctaggccagtgtggttggaatagagttttaacgaattttgcaggaagtaataaggacttcatatttgattctaagagcaatgagactccattaaatcgagtattaatcagaaagtggcatgatctgttttatttatttatttatttatttatttattttaatctttatatctgagacggagtttcgctgttgtcgcccaggctggagtgcagtggtgccatctctctcactgcaacccctgcctcccgggttcaagcgattctcctgcctcagcctcccgagtagctgggactacaggcatgcgccaccacgcccggctaattttttgtatttttattagagacggggtttcgccatgttggccaagctggtctcgaactcctgacctcaggtgattcacctgcctcagcctcccaaagtgctgggattacagcgggagccaccgcacctggccgcatgatctgttttaaataattactctggccaccttatggaaaatggattgttcggacagagctggacaaaagaatggaaacagaccagatatttcaggcaggctagagatgagcgtggcctggccttgcctggggcggttgtgactgactggattgggtgaaggacaggaaagctacaacaagggtgcctataggtgttcgtattgagtcactgggggcaccctaaatgggagttacctcagtagcagtttgagacaccagtcagataatggatgtgaaagcttttagaaaggttgaacggcggctgaaatcgcgtgtgttccatttacagatgggaaactgaggcacgagataccagaggatggagtcaggccacgttgtgcgccactctccccgcttaggtgggtgaggagaccgaggtgtgttgggcccccgctaaacaccagcaccgacctgagccccgcccagacccctccagccggctttccctgtcctctgctcgtgtgccaataaagttattgaaattgacaccggttgctaaggaagtgggtcgccgagccaggttgctaaggaagtgagcggccactgtctctccccatccggggcagcggggaatggctgagccaggggttcgccgcccccgccgccgccgccgccgccgccgccgccgccgccgcccgctttcggctcgggcctcaggtgagtcggaggggccgggcgcccaccgagcagggctaatcctgtggccgcctggggttttccctgcgacctgcgcccgcgcctctgcctggctttgctgtcccgcgagccggagcatcctctgccctgcctcctaggcatcctttggtagtccggacggccttgcccctccttcccctggcagggtcgcggcccgacccccagacacggccaccttgggtcgcagcccacctgggggccctgaggcggtggtcagggccccagtttgggaggagggcggggaagcgagagcctggggtccgaacctcggcgctgtgctgggcttgctgtgtgaccttgggcaagtcttttcacctccctggccttagctgacctgtttattcaatggggtcctaacattgctgctcagagtggtaaagataatgagaagtgtatgtgaaagtgccctaaatggggagagggagaattcttagggcaccctagatgggagaccaagagggcagtttgaagtctgagcgagttagagacgtggcatttccacttagtaactgtgtggccctgggcaagttaatttctctgagtcttcttttccttatctgtgaaatgaggtaatagactactgtggaaatcagtgagactgggtatgtcaagtagcttggcacatagtaagtgctcaaccagctattatgaggcgtccagggtaggagggcaagacttccaggaggagatgactttgggacaggtaaggtgtaggtgtgtagagtgccagctcatatgggtagtcctactgcaatgccaacccccaaccccggttttacttctccattctgctcagagcaagggaggtacttctacaagtagtcctgggaaactctttgaggtcaaccccttgtagatagctggggtcatggtctcattttctacctgggcttcgttgacccttccagaagaaaaaaggcatctttgtgtcctttgggaagtgcttaaagcagtaataactatttacaagcatatgattaagaagcactttaccaggcatattatttcatttaatctttatgtagactttgccaggtgcctggtgatgtcatcctcattttgccgatgaggaaactgaggttcagaaaagtaaagggaaggacctgcttaagaatccttttttttttttttttttttgagacagagtcttagtctgttgcccaggctggagtgcagtggcgcgatctcagctcactgcaacctccgcctcgtgtgttcaagcgattctcctgcctcagcctcccgagtagctgggactacagatgttcaccacctcgtccactaatttttgtagttttagtagagacaaggtttcaccatgttggcctggctggtctcgaactcctggcctcaagtgatatacctgcctcggcctcccaaagtgctaggattacatgcgtgagccaccacacccagtcattgcctaagaatcttgtatctattaagtgatggaagtggacgtgtttctaggtaaatcctgtattttatcccccattcactgttgcctctgattttgcaacagttgctattataaggccacaggggtattcttttgttacttttaactggctagaagttaaaaggcaaggaaacaagatctcaggtaaagctttatttaaatagataccacccaaagtgaggatctcagaaaatagttggaatctttttttttttttttgagacggagttttgctgttgttgcccaggctggagtgcaatggtgccatctcagctcactgcaacctccgcctccctggttcaagcagttctcctgcctcagcctcccaagtagctgggattacaggcatgtgccaccatgcccggctaattttgtatttttagtagagatggggtttctccatgttggtcaggctggtctcaaactcccgacctcaggtgatcgcctgccttggcctcccaaaggactgggattacaggcatgagccactgtgcccagcctgagagctggaatctttaaaagagggcttctctgtccctcattccctcctcattaaaatgaggggactaggctagattatactgaaggccctttcagtgctgttatgcagttgtggttaaaagcttgcaatcagactacctggactaaaatcttggctctgccacttccaagctgtgtgctactgagcaaagaggtgctactttacctctgaaatgatgctcagtacctctgaaatgatgagaggactttttggtaaggggctctgtgaggaagaattattcatagttcattttgaaccccttggtggtatagtttcctcatctgtaaaatggggatagtaataggccttattacctgtggccttattatcatgtatggctgttctgaggatttatttgaacttaatatatgtgaagtgcccagcatatttggtaaacattagctatcgttatttgggtttaacgtggtgcttgtgctgtattttccgtgtatggttggtgaaagaataaattaaagtatgtgataataccaggtccgtcaaccataatgtcattgcaagcatgaaacagtagccatcatggcattatataaatgttgatatttttatacagttggccccaggaacctgtaatcatgtgccacaatgggttgcaaagaaaggtaaagctgtccaggcatggtggctcacggctgtaatcccagcactttgggaggccaagacgggtggatcacgaggtcaggagatcgagaccatcctggctagcacagtgaaaccccatctctactaaaagaaaaaaaaaattagctgggcatggtggcgggcgcctgtagtcccagctactcgggaggctgaggcaggagaatggcgtgaaccggggaggtggaacttgcagtgagccaagattgcgccactgcactccagcctgggcgacagagcaagactccgtctcaaaaaaaaaaaaaaaaaaaaaaaaaagaaagaaagatgaaagctgatggtaggacgttaggtttagtagctcaacatccaattcagtaaatatttgctaaatccccttatgctaggcacatggaggatgtggaggtcaatcccatctccatatccttcgaggaactcagagcttaatttgcaaattactgcatttgacatctttaaatgaattcatatcttatgtttgccttggctgcagagtgaagccactgattctaatctgttttgttgtgtccctagacttctgttaggtgcctggattagaaacctcagattgcttcctaagccttttcatccattaattcgcaagtccctgagaaagaccccgtcttatgtaacagagagtagcaatacttgacaataacaataaggtgcctaatggcttacaaaaatgcctacacttgcttacacatgcttttactcatttaatcttatctgtgtcccttcaaggaaggtaaggtgcagattaggatctctgttttatagtcgaggaatctgaatggaagccaagaagccatgatgctattgagtggcccatttcacgttgaaatccagtcttctgtcttcaaattcagtgtacttaccactatcctgcccggattgtatttattcagtatttcctgagcacctagaatgtgtcagttctgttttagcctggagatatcatggtagaaaggtacagagtcccttgctctcatgcagcttatattctactggcagcaaacagaaaaatacagcagtaaatgaacaagggaatttggatgaggaataagtgctggggtgaaatcccatctctattaaaaatacaaaacttagctgggtgtggtggcacgtgcctgtagtcccagctattcaggaggctgaggcacaagaattgcttgaacctgggaagcagaggctgcagtaagccgaggttgcgccattgcactccagcctgggcaacagagcgagactccatctcaaaaagaaaaaaaacccaacaaacaaaaagaaaaagaaaaggccttgctaggatggtgacgtttttgctgagatttgctcccagggacgggccagccatttgaagacatgtcagaaggaagagcaagggtaaaggctgtgaggtggcaacaagcttggtaagttccagaaactgcaagaaggcttacaatggcagggacaggtgagtcaaaggcagagtggggaggtgggtggatgtaggggatggaagtggtagggagcgctcagatcatacaggaccttgtctgctagagtaatgagttgggattttgttctaaaagctgtggaaatcattggaggttctggagaagggacgtggcatgatctatttttgttttttaaaaaaatcactctggcctctttgtggcagtgaattttagagggcataggagtggcagccaggaggctagttaagaggttaggtgagagaagatagtggctttctaggttggtggcagtggagatggtaagaggacggattggggatgtgtttcggaggtagaaccagcaggatggcgggatgagggtgagagaataaggatgactcctgggtttttggcctgagcaattaagtagatgttagagatgccatctgcctctgaaatgatgaaaggactttttggtaaggggccctatgaggaagaattattcatagtttattttgaaccctgtagaggagaggcacaaggtataagcatcatactttatagtctgtggggaggaaatcccagattatgctggcagaagctagccaggtgcaactgattgaagcttgacgttcttactgtgaaccaaaaaaaaaagtcctgcttttctacagtctggctttttgccagcctgtggagcggcaggtgtgggctttgccagggcagtacccatctgtctttctgtcttgtgctgttggcattgcagtgctgactcgggatcttggctgagggagcctggccagctctggaagagggagcggaatcactagtgaagttcacttggtgtgccaaatggccacattctccctgccaaagtggttctttcctggtcaccaaatgacagttctgaagtttcagagcttttgacttcagaatccctggaaaacctattgtactctaccagaattcctagaggattcttgaatctcttctgagcaagggaattcgagcttcattgttatgtattccagtaactgtacttgtaaatctgggcattacagggttgtacattcaacattgtgaatagtaaaactaatagtcttatcactgccacttgtttatttaattaaatttaataaatttattcattttggagacagggactccctctgtcacccaggttggaatgcagtggtgtgatcatggctcccccacagccttgaactcctgggctcaagtgatccttctacctcagtctcttgagtggctgggaccgcaggcatgtactgtcgtgcctggctaatttaaaaaaaaatgttttggggacgggtgtggtggcttatgcctgtaatcccagcactttgggaggctgaggtgtgcagatcacgaggtcaggagtttgagaccagcctgaccaacatggtgaaaccccttctttactaagaatacaaaaattagctgggcgtggtggtgcgcacctgtaatcccagctactcaggaggctgaggcaggagaatcgcttgaacccgggaggtggtggttgcagtgagctgagatcgcaccactgcactccagcctgggcgacagagtgagactccgtctcaaaaaaaaaaaaaattctgtagatggctaggcatggtgactcacacctgtaatctcagcactttgggaggctgaggcacgtggatcacctgagatcaggagtttaagaccagcctggccaacatggggaaaccccatctctactgaaaatacaaaaattagtcgggtgtggtggtgcatgcttgtagtcccagctacttcggaggctgaggcgggagaatcgcttgaacctaggaagcggaggttgcagtgagctgagattgtaccacttcactccagcctgggtgacagagtgagactccatctcaaaaaaaagaaatttgtagagacgggtcttactgtattgtccaggcgtcttggccacaagtgatccactcaccttggcctctcaaagtgctgggattacaggcatgagccgctaatttttttagaaaacttggtctcactctgttgcccaggctggagtgcagtggtgcagtcatagctcattgtaacctccaactcctgggctcaagcgatcctcccacgtcagccatccaagtagctgagactacaggtgcatgccactacacccagctaattaaaaaaaaaaaatttttgtttttaatttttattttttgtagagatggggtcttgctatgttacaggctagtctcaaactcctggcttcaagcaatcttcctgcctcagcctcccaaagtgctgggattacaggcatgagccacagcacctggccaccactgctatttgtataactttgcagtttagaacgctctttcctgtgcattctcatttactaattgtcaatcagttgagatcatctggactacatattatccctggtttacaaatgaagacattgtggtgtggagaggtcacttgtttttgtcagtaatattgagcattttctaggtgctgagttagggagatccttgctgctcaaagtgtgttctctgtgacagatgtaccatgtccccaggaccttgtcagaaatgcagaatctaggctgggtgtagtggctcacgcttgtaatcccagcactttgggaggtcaaggcaggaggatcactggaggccaggagtccgagaccaacctgggcaaaacagtgagacctcctctgtatttttaaaaacagaagaagaagaagaaaacaacaacaataacaaggcccagatctaataaatcagagcctgccttttaccaagatcccggatgtttcctgtgcacattaaaagtttgagatgctctcacctaggtaatcagtagcaaaactaagacttaccaatgataatgacaatgaaggtaatagtcgtagctaagatacattagccaagcactgttgtaagcactttacacatgttgtttcatttagatttagacctcacaccaatcctgtaacacagatttccagaagaggaaagtagaggctcagaaaagttcagtaacttcctgacatctgctgactccaagtctattgctctttctaccattcattcgcgtgttcatctgtttttcaggtgggcagtgaccacatcttagctgtcttgtcaaaggcctttctcttccatacctgcataactaattttaaatgatgaccaaaaaaaaaaaaaaaaacagtgacttgaaagaatgtttgagaaaatcaagggaaaaacttctgagctagatgggtgtcagttacttgactgatgaggccgcaaacagatatctcatttggtcagataagctacctctcacacttcttagtgatctaacttcagggtccgaacagctgaagcaggtaggaactgtgagcttgtattctgagtcatttagctctaagctgtttcttgattctggtgataaatatctacactgggtgagaagatagtggataaagtcccatataacacctgccaactaattgttaaaacattccatctcactgtgcctcagttttctctctctgccctgtgggctcattattttcctttcaacacctcctgtctttctagactctcagaaagatatattggtcgaggactatgccattataggaaattttgacctgaaaggatggtgggaactgggtaaaggcaggattctatcaattctgctacttgctgtgtgacttggagcaagtgactcaacctctctaggcctctgtcttgcgcatacatatatatatgtaaaataaagatataggacagttcttcccaaagcccttccagccctgcccacaagactgaaccttgagttgggtgatattttgttctttcttggtgacttcatactgagctttctcccagacctttcgggtgtggcttttagagcgtatttcttggcagtcagagagcattacaatcagctcatcttatcagcatcacacatctgcacagcagcttgggatgttcatgtttaaggttcagttaatcatggtgacacattgtgtcttctcactttgtcacactgattgcggacattgagctcttcacacaggaagatctatctttagcatgctgatttatttaactcataatttgcattagagagggaaccagtgataatcatggtgggtgtggcttttatttttaaagtttttggcaagacatttgcagcacttgcattttgtcatgcttgaatatagtctataaatggaaatgggttcaagtgaaatagaaattgccatagattattgggagcttgggacttaaccactctggagtccttcatatcaccttcagcagtgctttcaggaagggcttgcttggccttttgtgtgtgacataaattaaacagaaactaaaagctcatagcacaatctctagcagcttagcagactacagtaatcattactttgtaacacatttcagaacataagcaaaaaatctagctggcaaatcataaaagattccatctaggtaagataaaatatcagttcaagttacctaaagataaccacaagaagatagtccttggtggaagtagttactggttttgcaagatctgcaataataagttagactctggcctaagaaatatatgtaatgtttttccttattcttcaattgtcagccttttaaaaatatataattttttccgattataaaaataataaacttccattgagtaaaaaaatgaggaaaatactgaacagattaaataaggctgactttaagatccaccactgagaaataactactgttaacattttactgtccatatacaaatgtattcctaaatacattttatctcataggcttgcagttctcacctgtttcctccattgttgttatttaggccattttcaacatttaaacattatgagtaatgcttcagagaacatcttaatgatgattattttgtgtaaacctttgtctgcactgctgatgatttctttaaactaggtcctttaatgttaaaaattttaaattacaaaggcaaccccccttaaataatgtttttaacatggcagtgttaacctaaagctgaaaagacagacagaattacaatttggttggggaatttacccatggtgatggtatcctaactcaggttttagcttacttgactacttgcaagtatatttttagaaagttgtattcaaagcatatttcccattttctatttggaaatgtttgcttaacattatttcataaccatttttccatatttttgtacttatttatttcaatttttgtttcattttatttttgtagaaacagggtctcactatgttgctcaggctggtctcaaactcctaggctcaagcgatcctcctgccttggcctcccaaagtgctcagattacaagtgtgagccaccaggcccaatctattttttttatttgtttatttttgagatagggtgtcgctccgttgcccaggctggaatactgtggcatgatcatagctcaccgtaacctccagctcctgggctcaagtggtccttccacctcagcttcctaagcagccagggccacaggtgcgtgccaccacttgtggctaatttttaaatttttcatggaggcaggatctcactatgttgctcaggctggtctcaactcctggcctcaagcaatgctcctgactcagcctcccaaagtgctgagactacaagtgtgagccactacgccttgctgtgtttttgtgtttagtagttattactacatgttagtagtttagtagtaactactacactttccctggcattgagcattgaagttgtttccacctttttataatcacatataatgtgttatacagaatatctccttctctctcagcctcttaagagaacaattctaaataagtggtttgtgaaaagtttgaactttaaaaaattctaacagagaactgtccatttcccttcttaggatcctctaaaagtatcttttttttttttttttttttttttttttcagatggagtctcactctgtcgcctaggctggagtgcagtggtgcagtctcagctcactgcaacctccgcctcctgggttcaagtgattctcctgcctcagcctcctgagtacctgggattacaggtgcacaccaccacgcccagctgattttggtatttttagtagagatagggtttcaccatgttggtcaggctggtcttgaacccctgaccttgagatctgcccatctcggcctcccaaagtgctgggattacaggcgtgagccaccgtgcctggcctaaaagtatctttaaaaaacagatttagctggatgtggtggctcattcctgtaatcccagcactttgggaggcctaagtgggaagattgcttgaggccagaagtttgagaccagcctgggcagcatagtgagaccccatctatacaaaacatatgaaaatttacccgggtgcagtggcttgcacctgtactcccaactactcgggaagctgaggcaagttcaagcccaggagttcaaggctacagtgagccatgattgcgctactgcattccagcctgggtgacacagtgaatgagatcctgtctccaaacaaacaaaaaatgaactttatttagatatattttacatatgatgaagtatttttttgatgtagtagtttttctcaccttctttttagtcttctctttatccatttttctttctgatgaagaattccctgtgagtaggacccagaacataggcctttgtcatttcaacccttcgttctctgaataggctgtttattggcaacattaactggaaacattttatgtacagcattggagtctcactctgtcgcctcagctcactgcaacctccgcctcctgggttcaagtgatgtgcactgtatgaactgtgagagcaagcatatcattataacattggacaatgagccaagacagttctgatggacttttgaagagggatttttcaaaaagcatttaactcatcatattaataaaataaatcctatgatttatgggaaattctgttggatcaactttggaaactgtttactataaaggtagcatgcgtaggcatgaatcttgataagacaagattctgatccggggttctgagtgggtccttatattctgcagagctgaaccaggtggaataggaggagagtttgggtaacagtcaaacacaacatccaaaattatgttgaatgtagtggtgagagctattccctttaaaactctctcttggttcttctgactgtgtcaagaatactgtatttgtttggtactggtctggtttttttttttttttttttgaaatggagtctcagtcacccaggctggagtgcagtggcacgatctcagctcactgcaacctctgcctcctgggttcaagcagttctctgcctcagcctcctgagtagctgggattacaggtgcctgccaccatgcccggctaatttttgtatttttagtaaagacggggtttcaccatcttagccatgctggtcttgaacacctgaccttgtgatccacctgccttggcctcccaaagggctgggactacaggcgggagccaccatgctcggccactagtctatttcttaacacttattaagctccctttcaaaccaatggtgatcaagcttaaggcctcagataagctacagtatttagctagaatttagtaacattgttgtctgttcttatatttattttcacagttactttctatttataacaagtgatactgattttccattcatggtggttatataaagtttctttttaaaataaactttgtgttaagcaaagtagatttaaagaaaaaacgttaagtaaataatagtacaggtgatgatagacatggcgaaaattgtccagaaacaatcggattattgacatttaggacatgctggtgtggaagaaaggccatggactttggagccagatggacctggtttcagcttgctttgccacttattaactcagtgtgccatgttacttccctgtctaagtctctgttttttttctcctgcaaattgggtcagggcagagttaccacttgtgggccagacgcttgctgcctgtcttcttctagtcctcacacggccccaagcagcaggtgttagtgatattcccattttacagatgaggaaatcagctccgaggggtaagaaactttcacagagcctcagaactacgaatgataggctgggcacagtggctcccagcactttaggaggccgaggcaggtagaacacctgaggtcaggaattcgagaccagcctggccaacatagtgaaacccacgctctactaaaaatacaaaagttagccgtgcgtggtggcaggcgcctgtaatcccagctgcttgggaagctgaggcaggagaatcccttgaacctgggaggtggaagttgcagtgagccgagatcacgccactacactgcagcctgggtgacagcaagactccatctcaaaaacaaacaaacaaaactaggaatgatagagctgggtttcagtcccaggtgtgtctgaatctctttttggctattcaggctacctctgcctgttaaatacaggttttgctatggccctctgcccatagcattattcacaatagccaagaggtagaagcagcccaaatgtccgttaacagataaatggataaagaatatgtggtacaggccaggcgcgatggctcacgcctgtaatcccagcactttgggaggccaaggcggaaggattgcttgaacccaggagttccagaccagcctgggcaatatagtgagaccttgtttctataacaaataataataataataaattagctcagtatggtggcatgtacctgtagtctcagctactcaaaaggctgaggtgggaggattgcttgagcctaggagttcaaggatgcagtgagctgtgattgcaccactgcactccagcctgggtgtcagcaagactgtgtctcaaaaaaaaaaaaaagaaaatatatatagtgcatacatggaatggaatattattcagccttaaaaaagaaggaagttctgacacatgctttagtattgatgaaccttgagggcattgtgctgagtgaaataagccagtcacaaaaggacaaatactgttatgattccacttatccgaggtagctagagtagacaaaatcatggaaacatggttaccaggggctaaggagagggggaaatggggaattgttcagtggttataaagtttcagctttgcaagatgaaaaagttctagaaatgtgttatacaacaatgtgaatatagttaacactactgaactatacacttaaaatgattaagagggtaaattttatattatgtggggttttttactgtaattttaaaaaaattttaaatgataagccattggttagagggtgatttttttttcatttggaaaatcccaattatgcataaaactagaataatgtaatgaatcatgaacccattacccacctccagcagttctcagcacttggcaatcctattttacctataaccttccatgcaccccacccctgaaaaagatcccagatggcatataactttatctgaaaatattcttgtttacctctagaggataagaactttctttttaaaataataacatttttttacacgtaaaaataatttcttacattgtctcatatccagtgttccaatttccttgattgtcttatacattttttttttttttttgagacagagtctcgctctgtcacccgggctggagtgcagtggtgcgatctaggcccactgcaatctctgcctcccgggttcaagcaattctcctgcctcagcctcccaagtagctgggattacagacatgcatgcaccacacccaactaatttttatatttttagtagagacagggtttcaccatgttagctaggctggtcttgaactcctgacctcgagtgatgcaccctcctcggcctcccaaagtgctgggattacaggtgtgagccaccgcgcctcgcctcattttttttttcttgagacagggtctcactgtatcacccaggcttgagtgcagtggtgtagtcagagctcactgctgcctcaaactcttaggcggctcaagcaaactcctgggctcaagtgatcctcccaacttagcctcctgagtagctggggccacaggcatataccaccgcacctggctaatttttaaaaatttttttgtagagacaggatcttgccatcttgtccaagctggtcttgaactcctaggctcaagtgatcctcccacctcagcctcccaaagtgctgggattatgggtggtgaaccacctagcttggtccttgtacatttcttaacagttggtttgtttgaatcaagatcaaaaaaggagctggacgtagtggctcaccatggtggctggtattacatgatggacctgtaataccagcagtttgggaggcctaagtgggagaatcacatgaagccaagagtttgagaccagcctgtgcaacaaagcaagaccccccccaacttctacaaacaattttaaaaattagtccaggcatggtggctcatgcctgtaatcctagcactttgggaggctgaggtgggtggatcacttgaggtcaggtgtttgagaccagcctggccaacacggtgaaacctcgtctctactaaaaatagaaaaaaaaaaaaaaaaaaaaaaagaaaagtcgggtccagtggcgcacgcctgtagtcccagctactctggaggctgaggtgggacgattgcttgagcgaggagttcgaggctgcagtaagctgagattctgccactgcactccagcctgggcaacagagcaagaccttggctcttgaaaaacaacagaatgtgaagaccttgactcttaaaaaacaatagaatgtgtacaacagtcctacctctgggagtggatcctaccaactactcccacttaccctaaaggtatatatgttcagtatagccactgcagtactgtttgcagtagcaaatgaccagagaccatcagaaggtccctcaataagggactgactgatcaaagacattttttggctgggcgcagtggctcatgactgtaatcccagcactttgggaggccaaggcaggcggaacacctgaggtcaggagttcaagaccagcctggccaacatggcaaaaccccgtctctacaaaaaataaaaaattagttggatgtggtggggtgtgcttatagtcccaggtacttgggagtctgaggtgggaagattgcttgaccccaggaggttgacgttgcagtgagctgtgattgtgccactgcactccagcctgggcaactgagactctgtctcaaaataaatgagtgaatgaatgaatgaatgaaaggaagtaagacagaaaagaaaggaaaaagaagcagctaagcatggtgtctgatgcctgtaatcccatactttgggaggctgagagacggaaggatcacttgagccaggagtttgagaccagcctggggaccagcctgggcaacatagtgagacatttgtctctacaaaaaataaaaacaaaattaggtttggtggcatgtacctgtagtcccagctactgaggaggttgaggtgggaagactacctgagcccaggaggttgaggctatggcgagccaacatcatgccactgcactccagcctggagtgcagagcaagagtctgtctcaaaaaaacaaacaaagaaaacaacacaaaatgagttggggggcggggagaaggagttctccaagatttatataggaagaagtacagtggtatatagtatactgctacttgagttaaaaaggtttaaaagcaaaagatgaagatgaaggagcaatgcagatatgttaggaagatttacatgttcactgtacactctgtacagcttgaattgcgttaatctttgcatagacatacacatgtatatatgcgtatatatcaggtgttttaaaaatatatgggtttatatatgggttttaaaataagacaaatctggttttgaatcctgactcttccacttaattgtcgtgtaaccttgggcaaattaatttccctgagtctctgatccttattctttaaatgaggctaatgcctgccttcctcccaaggtgattttgaggattaaaagaggactcacattaagctcttggtatactgtgagttgtgactattgaatacaataaaacccaagaactgcattgattctgaatagtaggtgttgtccaacagacttgaatatatttttgaatgtattttatgttttacaattgaatgccaaaaagagtttcttttcttctttccctgcctaaataaatgctttgtttgcctctttgtgtcatcaaatgacagagagtacatggcgccagtttgaattcagggcaggcatttattgtccttgttacttgactgtgacgtttttaggtttctttccggagaactagcgtgtcttcttcagacatttaagctgaaatcaaagttctggacttttctccaaagaaaacattgctttattgcttcccccaccttaattataaaaatcaaaatacatgcacccatcaaaaaatacaaagaaagcaaaaaaatagcctgcaggcgcaccaccctagaggtcaatattacctgcatttcatgagtatttattagtacttttcaatgttaaaagctaagcatttaacattcattagtttatttaatcctcagaacagttctttaagggagatattgctattaaccatacttggtggaagaagaaactgtgacttagtttcttgagattttatagctagtaaatggcagagcagaaattcaaagccagacctgctgaacacctcagctcatgcttttaacaatgtctttactctgtgttccccaaatctgcatctgcacatgtgcctgtacacataaacattaactgtatcatagtaattctgtttagtagcctttttcttcactcagcaatatgtcttgaatattgcccatatctaaatacctagaggtttgttgccatttttaatgacttcatagtttcccattgtagagatgtgccataatctaaccactcccttattgatgagcatttaagtgcttagaggtggtgatgtgacaaacacaaattgtgtattacattgttgcacatgtatttagttactcaattatgtccttaaaataattccaagaaatggaattgctgtttcaagggagtattcacatttagagttttggtactgattgcctgactgccctcaagtatgttgtgccaatttgagatgctgtggctcttatatgttctttctgtaagggacattttgaaactttttagacagttcacgcaactgtttggcttacaaaaaaggtgacgccccccgcccccttttttttttcttttgtgacagaatctcgctctgtcgcccaggctggagtgcagtggtgcgatctcagctcactgcaagctccgcctcccgggttcacaccattctcctgcctcagcctcctgaatagctgggactacaggtgcccgccatcatgcccagctaatttttttgtatttttagtagagacggggtttcaccgtgttagccaggatggtctcgatctcctgagatcgtgatccacccgcctcagcctcccgaagtgctgggattacaggtgtgagccaccacgcctggctgaccttatgtttacaaataatgcctgtaataacaacagaatatatttcattactttcttatttgacgtctatgctctaaatgctttttagagccgtcactgcatgacttgctacatttaccttagaaagttaaaaattctagtgctgtggacctaatagaaactgttttacgaagcttcatcataaatttaggataagtaggtcccgaatttaggtctcctagtaggtcccctcatttatcaattaaaacatttttattatctttttttttttttttttttttttaaattgagacagaatcttgcactgtcgcctgggctggagtgcagtggcatgatctcagctcactgcaacctctgcctcccgggtttgagtgattcttctgtctcagcctcccaagtagctgagactacaactgcctgccaccacgcccggctaagttttgtacttgtagtagagacggggtttcaccgtgttggccaggatggtctcgatctcttgaccttgtgatccacccgcctcggcctcccaaagtgctgagattacaggtgtgagccaccacacccggcccatttttattatcttatattcatggtggtcagcacaaatggatagataaaatgggaaaaatgagtaacccctgtatatttgtttaatttcacaaagcctttccatctctctttccccttgattttattttattttttgactaagtaatatatttacatgattcaaaactcaagagatattaaagggtaaacacactttgggaggctgaggtgggcagatcacctgaggccgggagttcaagaacagcctggccatggcgaaaccctttctctactaaaaatacaaaaattagctcggtgtgatggtgggtgcctgccatcccagctactcgggaggctgaggcacaagaatcgcttgaatgggaggcagaggttgcagtgagccaagattgcaccacagcactccagcctgggtgacagagtgaaactcggtctgaagaaaaaaaaaagggtatataatgaaaagtttctcttctacttttggccctcatccacctagctcttttagggaaagccagtgttgttatctggcaattgttacatggttcttgtgaattctttcagatatattttatgcacatataagcaaatgtagaaccattttctcaatatgtataaaacgtctttttaaaagttctgcaggacagtggtgttatttttcaacccaagatggataatcttgttttaaaaagtgtgtaactccctttgtgaaactggccatcataggaaccagagacctagaattggacttgctttcatggtgtggttcagggattgcaaacacggagtcctgatacttcaaaaacaattagaaataattgtaaaaaggagtagtgttgatggtgatgaggtggatacagagtaaaaacagctgcttcccccgagagaagcctgtccagggaattggtttaggctgcttagcagggagtcgcttttacttcttgctcgagtgttgcagtgcttttctgatggctcatgtgatctttggcttgggctgcatttcagatactctgagtatttgaaccctgggccaggcagttggcaggtggttgcgtgatctgatcttagaggacattgctttggaatgcattgatttgaggtgcgttagtatgcactctgtgtgcccacaggttgcacctccttgcagggttgttcctggggaattgccagacctctattttttcccatttggagataccacatactcattaaagagaatttggaaaatacagaaatgttgaaagagcaggggaaatcacctatactattacccaaggttgaccactattgatgtttttacgtgtgtctttatttttatataattgtgattgcatgcagtgattcaattttgtaaactgctttttcatttatgataagcattttccatgtcattacagagcctcggcaaatggcatttaaaaagatgggctagtatgtcgggcctttcttaatcaaatcatacatatatgaatttggtcatagacagagatgtctacaagagccagccaggaagtataaatgagcaaagcatgctagatatgaaacaggagatagtggggttggggaagattcctattgctgccacttggggttcaggtcaagggctgtcagatattcccatgtttccagagaagtggatttttttttttaatatgaaattgttaggccgggtgctgtggctcacgcctataatcccagcactttgggaggctgaggcgggcagatcacctgaggtcaagagtttgagaccagcctgaccaacatggagaaaccccatctctacttaaaaaaatacaaaattagctgggcaaggtggcgcatccctgcaatcccagctacttgggaggctaagcggggagaatcgcttgaacctgggaggcggaggttgcagtgagccaagatcatgtcgttgcactccagcctggacaagagtaaaactccgtctcaaaaaaaaaaaaaaattgttgtttttttgaattaaaaaaaaaaattcaggcctggtgcaatgtcacaccagtaatcccagcactttggaagtccagggtgggtgggtcacttgaggctgggagttcgagaccagcctggccaacatggcaaaaacccagccctacaaacagatacaacaattaattgtgcatggcggcctgagcctgtaatcccagctactcaggaggctgaggcggaaaatcgccagggaggcggaggttgcagtgagctgtgattgcgccactgcactccagcctgggtgacagagtgagactctatctcaaaaaacaaacaaaacaaaaattcagagaataatataagaaatagaatcagcaaagtaagggaaatgttataaagcttgaaaccttcctgtttttgttttttaagagaaaggataaagtattacagataaagttgaaatatccttcccatctctactcccattatccatacttcccattgcccagtttgggcagccactgtcataaattgttatatatccttctatctcccctcccctcccctcccctctcttccccttcccttcttcagagacagggtctcactctggagtgcagtggtacaatcgtgactgactgtaacctccacctcctgggctcaagtgatccttccacctttttggagtagctgtaggtagtaggccaccacactgggctaattttcatttcttgtagaaatagggtcttgctctgttgccctggatggtctcaaacttctgaactcaagtgatcatcctcctacctcagcctaccaaagtgctgcagttacagaggtgtgagccactgcacccatcctatcccactttttagtacttatacatacataaatgcaaatccatgagcaccgtatttttttgtaaattcctaatcgtaactgtcactctgcagctttgtttctcactcagcctatttatttatccatgttaaatctgtaagcctaattcagagattggcaaacactttctgtaaaaggccagatagtaaatattttagtattgtagtccatattgtctctattgcaactactcaactctattcacctctatagttaatgcagcagtagataatatgtaaactaaggaatattgctgttctaatataactttgtttacaaaaccaggctctgggccagatttgtatcctggactgtaatttgctgacctctgctctaatttattccttataacttgtaactactgaatggtgtgtgtgtatatatatatatatatatatatatttttttttttttttttttttttttgagacagagtcttgctttatcacccaggctggggcacagtgtcgcaatctcagctcgcttgcaacctccgactcttgggttcaagtgattctcgtgcctcagcttcctaagtagctgggattacagcgcatcgcagcatgccctgctaatttttgtattttttagtagagagagggtttcgccatgttggccagggtggtttcaaactcctgacctcagatgatcctccggcgtcagcctcccaaagtgctgggattataggcgtgagccaccacacccagccatattgtctataatatgaatatatcatattttattattcaattcccctataaatggatgtctaggttgtttctagattttttttgtttgttttttgggacagggtcttcctctgtgactcaggctggagtgcagtggtgtgatcctgacttgctgcagtcttaacctcctgggcttaagcaatcctcctgcctcagcctcccaagtactgggactataggcatgtgtcatcacgcctggctaatttttaaagatggggtctccttctgttcccaggctggtctccaactcctggactaaggcaatcctcctgccttgtcctcccaaagtactggggttataggtgagagccgccacactggcctgttttgttttgttttgttttgttttgttttgttttgttttgtttacagatagtgtctccctctgtcacccaggttggagtgcagtagggctattatggctcactacaacctccaactcctggactcaaggtatcctactgcctcagcctcccaagaagctgggactacaggtatattctaccacacccagctatattttttaaatgtaaattttttttttgagacagagtctctctctgtcgcccgggctggagtgcagtggtgcgatctccactcactgcaagctccgcctcccaggttcacaccattctcctgcctcagcctcccgagtagctgggactgcagtcgtccaccaccacgcccccaattttttctgtatttttttagtagagacaggatttcaccgcgttagccacaatagtctccatctcctgtccttgtgatctgcccacctcggcctcccaaagtgctgggattacaggcgtgagccgccgcacccgctgatttttaaaaatttttttgtagagatggtctcactatgttccccaggctggtcttgaactcctggccacaaagaatcctcccacctcggcctcgcagagtgctaggattacaggtgtgagccactgcatccagcctgtttctagtttttctactgtgataaccatgctgcaggaagcaatcttgtccatgttttcttgtgcacatatgcaaagctttttactaggatatacatagatagagaagtggaattgctgaggattttgttgttgttgttgttgttgttgttgttgtttatttttacttttggaaacagggcaagacctagcaccaggctggagtgcagtggtgcaatcatggctcactgtagccttgacttgggcttacgtgatcctctcgcctcaatctctcgactagctaggaccacaggcaagcggcaccatgccctgctaatttttaaatttttggtggagatggaggtcttcctatgttgcccacgcttcatggtcttttttttttttttttttttttgagacagagtctcactgtcacccaggctggagtgcagtggcgcaatctcggctcactgcagcctccacctcctggattcaagcaattctcccgcctcagcctcccaagtacctgggactacaggcacatgccaccacacccagctaattttggtatttttagtagagacgaggtctcaaactcctgacctcaggtgatacgcccgcctcggcctcccaaagtgctgggattacaggtgtgagtcactgtgcccagcccatgttttatttatttatttatttatttttgagacgtagttctgctcttgtcaactaggctggagtgtaatggcgcgatctcagctcactgcaaaccctgcctctgggttcaagcaattctcctgcctcagcctcccgagtagctgggattacaggcgcccaccactatgcccagctaatttttgtatttttagtaaagacggggtctcaccgtgttggacaggctagtcttgaattcctgacctcaggtgatccacctgcctcagcctcccaaagtgctgagattacagatgtgagccaccatgccaggcccatgttgttttaaataccaggtgggccaaatgaaatgttttagatagaatgtaaccagtttgtgacctctctcttacgctttccataggaagccaatagttactgagaatccaattcatacctagttctggactttgaggtgagactctatgacagctagcaaggtgaggatgcgtgaatctaaacacaaaagagttggagaacggtctggaagagtgtgactgccgtgacaaatgtgcatctgatttcctcagcagataaaagagttgaggttggggaattactcaatttttcatgttcaataaccattcaaacagtgggtgttaacattgaatgacaagttctagcagaaaaggtcttcaggatgaaggcgatgagctgctgatctgtgcttccttctttcctggcaattctgtgagtttctttaaagatttatcactctaattagacccactggaagaataacaaaggtaataaagaaagagtatcagggcatccttccaagaaaactctctcctttgaggaagacccagaataagattttaagccttggtggcaggaaattaacttagtccattttcctgaaagaatatgtcaataatacatgactagttcagtctagctgggtgagttcagaaaagaaatggtgttctgtgttcagagttgaggagatttaattaaggggactcatgctttgggaattccttcctttttaaagatttttaagattaatgtaggtcattatcattcctttgtttctatcattttggagagctcaaaaaatatatggagctattacaaagcagctgaacctcaaggtcagcttgctgcaggctttctttcttctttcataggcttggagccccattgttttgacaggtaaaagtcggacagctccgccttctcagaagtctgtaatgcagaagaatcagtcctctgcactgacctgtctccctgtcctgccctgccattctgtttctcttactctatcaggtctaggatcttgtctggcaggctcgtgcactgaaacagaggtcttcccagaggatatcaggggctgggattttccctttgcacctagatcagctttggcaggcgtctgttgaaatggagggagagacaggccgtagctcatgagccattcccctgaaatgaaaagacgcaggaaactggccattctaacatctgtctctttcttcccatctggcaaaattctaatagcatgtagaagaagtttgtccaacccgcggcccaggatggctttgaatgtggcccaacacaaatttgtaaactttctttaaacattatgagattttttttgcaattttttgtttaactcattaaccatcgtagtgttagtgtattttatgtgtggtgtggctcaagacaattcttcttccagtgtggcccaaggaagccaaagattggacacccttgatctagaagataatgactacattcctgaagggcttccttttgcatagttttctttacacggcttgagatttagttcttattgaacatcaattaggtatttagatctcaatttaatctgaattttttttaggatgattgttacaaactgaacaatagaaatgttattttagagtgggcgctgtggctcatgcctgtaatcccagcactttgggaggctgagtggggtggatcgcctgaggccaggagttccagaccagcttggccatcatggtgaaaccccatctctactaaaaatgcaaaaattagctggacctggtggcgggtgcttgtgatcccagctacttgggaggctgaggcaggagaattgcttgaacccgggagacacaggttgcagtgggccgagatcatgccactgtactccagcctgggtgacagagcgagactccgttaaaaaaaaaaaaatgttaatttaggctgggtgcagtggctcaaacctgtaatcccagcactttgggaggccaaggcaggtggatcacctgagatgaggagtttgagaccagcctggccaacatctctactaaaaatacaaaaattaaccatgtgtgttggtgggcacctgtaatcccagctattcgggaggctgaggcaggataattgcttgaaccttggaggcagaggttgcagtgagccaagattgtgccattgcactccagcctgggtcacaagagcaaaactcagtctcacaaaaaaaaaaaaaaaaagaaagaaaaagaaatgttattctagtgatgtttaatgcataaaattaggcctcatccttaatctctggaatgaccctctgacaagggttttggatgaatctgtattgttattttaatctagctttgtattagtttacaaagtacttccacccttataagcacctcttagtctcataatcatccataagaaagaagaattatacctattttttcagatttacagaaaacgggttcagagagggtaagacgtcttctggatttcttcattctagacaataatattttattacatgtaacaactagaagaaatatgaaaagcaactttttgtgtttccacttgcttagcagcagaacagtctgtgaagggcagtgggggaatatgttgatgctgtctatttattaagccacagcatatatgcccaagtggcccatcactgcttcaccttctcccaccatgggagaatggcaggaaataagtcattctcacaactaaaaagaatactgctgtcattgttctgcatattttttaaaaattgcaattgcatatatcctttgattcagcaattccacttctaggaattgatgcttacagatacactttcccacacatgaatgattgtacgtcctaggtttttcacagcagaatatcagaaacagctgaagtgcatctgcagcagtgacataaattatggtgcatgcatgcagtagagtatgatgctgctgttgcagagaataaagcagctctgtatttaccgaaggaatgaactccaaggacactgtttattattgtatataatatgtttgtgtaaaaagggagaggataaatgtgtattaatacatatttgcttatgtatcaatgatttaaaatctaataacacttgtctgtgagcagcagaacagggtggctagagagcaggtcacagagagagagagagagagagagagagagacctgtcactgaagagccttttgataaaaaaaaacagccaggcatggtggctcacgcctgtaatcccaccactttgggaggctgaggtgggtggatcacctgaggtcaggagttagagaccagcctggccaacatggcaaaaccctgtctctactaaaaaaaaaaaatacagaaattagccgggcatggtggtgggtgcctgtagtcccagctacttaggaggctgaggcaggagaattgcttgaacccaggaggtggaggttgcagtgagccgagatcgcaccactgcactccagcctgggggacagaggggagactctgtttaaaaaacaaacaaacaaaaaaaacccaaaaaaacatgaattacatgtttttaaaaatccctgcacttagtcaggtgtggtggtgtgcacctatagtcccagctacttgggaggccgaggtgggaggagatcacttgagcctgggaggtcaaggctgcagtgagctgtcatcacgccactgcacttcagcctgggtgacaaagcgagactgtcttttaaaaagaaaatttaaaaatccctgcactgagatttataggagtttggggtcctcatatataccggtaaagtactctgacctgcttactacctacccccacccaaaggacccatttaatcctttcttctgctccctgagttttccagcaccaaatgaaactctgtctctttttgtttttactttataaaattttaacactcccccacctttttttttttttttttttttttgtgtgtgtagatggagtcttgctctgtcacccagactggagtgcaatggcacaatcttggctcactgcagcctccgcctcccaggttcaaacaattctgctgcctcaagtagctgggattacaggcacatgccaccatgcccggctaaatttttgtatttttttttttttagtacagatggtgtttcaccatgttggccaggctggtctcgaactgctgctcaggtgatctgccctccttggcttcccaaagtgctgggattacaggtgtgagccaccacacctggctccattttcttatttgcattccaattctattaaatttattgattgattttgtatttttagtagaccatggtggcaggtgcctgtaatcctaactattcgggaggctgaggcaggataattgcttgaacccaggaggcagaggttgcagtgagccgagatcacgccattgcactccagcctggtcaataagagcaagactccatctgaaaaaaaaaaaaaaaaagaaagttattgccgggtgcggtggctcatgcctgtaatcccagcactttgggaggccgaggcaggccagtcatgaggtcaggagatcgagaccatcctggccaacatggtgaaaccccatctctactaaatatacgaaaaagattagctgggcatggtggcatgtgcctgtaatcccagctactagggaggctgaggcaggtgaatcgcttgaaccagggagtcggaggttgcagtgagccaagatcacaccactgcactccagcctggcaacagagcaagattccgtctcaaagaaaaaaaaaattattgattgaatgagtgctttttatgtaatgcattataccacatccttatttatttgcacacattttgcacaagccagtttttattaatgattgtgggattgaaaagtattattagcacaagctaggaaattctaacactacaaatgagtatactgtgaaaagtttttcctctttttttttttttttttttttttttttgagacggagtctcgctgtgtcaccaggctggagtgcagtggtgcaatctcggctcactgcaatgcaaccgccacctcccgggttcaagcaattctcctgtctcagcctcccaagtagctgggactacaagcttgcgccaccatgcccagctaatttttgtatgtttagtaaagacggggtttcaccatgttggcccagatggtcttgatctcttgaccttgtgatccacctacctcagcctcccaaagtgctgggattacaggcgtgagccaccacgctcagcctttcctctctctttaggcttctgagtctcctgggcccatagttcccgtgctaaagctgctactgttactacctttagaagtatacttctaacaatattgtattcatatcaagcatataacatgcatatatccccccttttcttatgtaatgtttgttttttaaatagagtttatttttagagcagtttcaggttcccagcaaaaataagcggaaggtacacagatttctcacatacctctgcctccacacatacaaagcctcccccattatggacatctcctaccagagtggtacgtttgttataagcaacagacctgcattgacacattatcacccaaagtgcataatttacattaaggttcattcttggtgttatagcttccatttttcacactatgtaaactatactgtacacactgtcacctacttttttcacttaacaacatatcttggtataggattacatttagattaccaccttctttttaataactgcataggattccacatatatggaatatatttaatttaatcagtctcctcttgatgggaacccgggttgctcacaatctgttgctcccacaataaatatccttatgtatatgtcattgtttaaaatctgtatctctaggataaattcttagcagtacaattgctagttcaaaaagtatatgcattttaaatgttgatgggtaggtccaaattgctctacccagaggttgtagtatttcaacaggttatagtagttcaagagaatataagactttttttcatttgtttaagaaaaggtttttttgggaggccgaggtgggtggatcacgaggtcagaagatcgagaccacagtgaaaccctatctctcctaaaaacacaaaaaattagctgggcatggtggcgggcacctatagtcccagttactcgggaggctgagacaggagaatggcatgaacccaggaggcggagcttgcagtgagccgagatcgtgccactgtgctccagcctgggtgacaaagcaggactctgtctcaaaaaaaaaaaaaaaaaaggaaaataaaaatagtgaccagcctgggtggctcacgcctataatcctagcactttgagagaatgaggtggagggatcccttgtggccaggagtttgagaccagcctggccaacatggcaaaaccctgtctctactaaaaatacaaaaaattagccgggcatggtggcaggtgcctgtagtcccagctacttgggaggctgaggcaggagaatggcatgaattcgggaggcagagcttgcagtgagccaagctcacaccactgcactccagcctgggtgacagagcgagactccgtctcaaattaaaaaaagggtttcattctgttgtgtaggctggagtgcagtgacacgatcatagctcactgcagccttgaactcctgggctcaagcaatccttcttcctcagcctcctgagtagctgggaccacaggcacacatcaccacccctggctaatttttatttttgtatttttattttactgtatttattttgaaacagagtcttgctctgtcctccaggccagagtgcagtggcgcagtcttggctctctgcaacttctgcctcctaggctcaagtgattctcgtgccacggccccctgagtagctgggattacaggtgcccaccaccacgcccagccaatttttgtattttttgtagagacagggttttgccatgttggccaggctggtctcgaactcctggccacaagggatccatccacctcgttctcccaaagtgctgggattacaggcgtgagccactgagcctggtcattatttttattttactttttttttttttttttgagacggagtctcgctttgtcacccaggctggagcgcagtgccaggatctcggcctctgcctcccaggttcacgccattctcctgcctcagcctcccaagtagctgggactataggcgcctgccaccacacccggctgattttttgtatatttagtagagatggggtttcaccgtgttagccaggatagtctcgatctcctgacctcgtgatccacccgcctcggcctcccaaagtgctgggattacaggcatgagccaccgcgcccagccgcttattttactttatttttaagatagagtctcactctgtcatccaggctgaagggcagtggcgtgattgcggcttactgtaccctcaacctcctgggctcaagcagtcctcccatctcagcttcccgagtagctaagactacaggcatgagccaccgtgtgcagctaattgttgttggtattttttttttttttttttggagagatgggggctccctatgttgcccaggctgatctcaaacacctgtactcaagtgatcctctggcttcagcctcctaaaatgctgggattacagatgtgagctactgtgtacagcctaattcacaaattttttggagacaggatcttgctgtgttgcccaagctggtctcaaactcctggtctcaaggaatttccctgcctcggcctcccagagtgagacccagacttaaaagatttccagctgcctcagcctatagcataagatcagatattgattgagaggaggatgggctagccaacaacactggtggactgcagttttttatttttaccactgaagctggttaagatcctgtgaggaaatatacagtgtagtaaagttatcagatatggctgtcaggttagcaagatgaagactatttaggtgtgtcagcttctgtcaggcaggctgcaatgacaacggtactgtgcttatttacttttgctttttctctaggaccgtagcatcctgagacattttgaattgacacttctcaagatttgactggatcagagttcatcatgtcaaagttgaaaagctcagagtcagtcagggtggtggttcgctgtcggcccatgaatggcaaggaaaaggctgcttcgtatgacaaagtggtggatgtggatgttaagctggggcaggtgtctgtgaagaaccccaaagggacggcccatgaaatgcccaagaccttcacctttgatgccgtctatgactggaatgccaagcagtttgaactgtacgatgagacgttccgaccacttgttgactctgtcctgcaaggtttcaatggaaccatttttgcctatggacaaactgggacaggaaaaacctacaccatggaaggaatccgtggtgaccctgaaaaaagaggagtcattcctaactcatttgaccatatcttcacccacatctctcgatcccagaatcaacaatacctggtcagggcttcttacttagagatctaccaggaggagatccgagatttgctctcaaaggatcagaccaaaaggcttgagctcaaagagaggcctgacacaggagtgtatgtgaaagacctgtcttcctttgtcaccaagagtgtgaaggagatagagcatgtgatgaatgtggggaaccagaaccgttctgtcggtgctaccaacatgaacgagcacagctcgcgttctcatgcaattttcgttatcactattgagtgcagcgaggtgggcctcgatggtgaaaaccacatccgtgtaggaaaattgaaccttgtagatcttgctggcagcgaacggcaagccaagaccggcgcacaaggggagagattaaaagaagctaccaagatcaacctctccctttccgctttgggtaatgtcatctctgctctagtggacggcaaaagcactcacattccatatcgggactcaaagcttaccaggctcctccaagattcccttggtggcaatgccaagactgtgatggtggccaacgtggggcctgcctcttacaacgtagaagagactctgaccactctgcgatatgccaaccgtgccaaaaacattaagaacaaaccaagggtcaatgaggaccccaaggatgccctccttcgagaattccaggaagagattgctcggctcaaggcccagctggaaaaacggtccattggtaggaggaagaggcgagagaagcggagggaaggtggtggcagtggtgggggtggggaagaggaggaggaggagggagaagagggtgaggaggaaggggatgataaggatgattactggcgggaacagcaagaaaaactggagattgagaagcgggccattgtagaggatcacagcttggttgcagaggagaagatgaggctgctgaaggagaaagagaaaaagatggaggacctgcggcgggagaaggatgctgccgagatgctgggcgccaagatcaaggtaccatacccgtacccttccttaggcccttgccctgtcactgcttttgctttcatcaaacaacaacaaaaaacataaccatatgagggatgatgtctctcatcagttttggatttccaacagctcatgatatccagtactcagtaaacctctgtttaattgacatgaatatgattttttcacatttacaaaaatgaaaattgaattcataatgagaataattattatgtatgcacatagtataaagaacagcaacgcctgtaatcccagcactttgggaggccgaggcgggcggatcacgaggtcaggagatcgagaccatcccggctaaaacggtgaaaccccgtctctactaaaaaaatacaaaaaattagccgggcgtagtggcgggcgcctgtagtcccagctacttgggaggctgaggcaggagaatggcgtgaacccgggaggcggagcttgcagtgagccgagattgcgccactgcactccagcctgggcgacagagcgagactccgtctcaaaaaaaaaaaaaaaaaaaaaaaaaaaaaaaagaacagcaataaaagtaacacccacgtacccccccacccagtgtaagaaatagaacaacatccatttttctttttttttttttttttgagatggagtttcactctcgtcacccaggctggagtgcagtggcgcgatctcggctcactgcaacgtctgccatccgggttcaagtgattctcttgtctcagcctccagagtacctgggattacaggtgcctgccaccacgcccggctaagttttgtatttttagtagagatggggtttcactatgttggcctggctggtctcgaactcctgacctcaggtaatctgcctgtctcagcctccccaagtgctgggattacagacgtgagccaccgtgtccggcttttttttttctttctttcttttttttttttgagacaggatcttgctctgtcaaccctggagtgcagtggcccaatcactgcagccttgacctcctaggctcaaaggatcctcccacctcagcctcccaagtagctaggactacaggcacgcaactttgcctggctaaattttttaaattttttgtagagacatggtctcactatgttgttcaggctggtctcaaactcctgggctcgaatgattctcccacctccccctcccaaagtgctgggattacaggcgtgagccactgcacccagctgatacctatatctttagtagctccttgcgtttccctccccaacagataaccatcatcctgaattcggtgtttattgtttccttgcttttccttatagttttactttctacatgtatatttctaaagaaaacatggtttcgttttcatataattttttgcttttatgtaaatggaatcccactcatgccatttgcttttatttttgcaacattacgttcatgagatttatccatgttgatgcctgaagctgtggttcactcattattactgttccaagtattccatggtattccattctcctggtgtatgggttgtttccagtttctgctgtgaatgctcttgtgcttggcttcaggagaacatggacgtgcaagattgtcttgtttggcactgttaggtcttagggtatttgcagcttcaacttctctagacaaggacaagttgttttctaaagtggttgtgcagattgaaacacctcgcagcagggtatcagttctggatgccccgcatccttaccagcacttgtgatgatcagactaacatttgcatatagtatagcctctcagtgcagtttcagtatgcagtaccctgattacacaagataaggaacacttccatcacccccaaaatgtcctcatgctactttcttatagtcagcctcctctcccaacccctgtgtgctaatatatttctttacatccattccattttccacccaatggctagttagcattctggagtgctgaggctcccattgttttgagccttctttctggtggcaatgcactatgcctgcagttgcctggactctgagcttccactgggctttaatggcagaggagagtgcaaaggtagacttggaaggctgaggatggccactggctaaccacaaggcagaattccttggaaatgttcagttctgttttattgaattcatgcaaactttgatttctatcctaaaatgtctccatgtttataaattttaaaattacaagttatctttgcctccctcctacccctactgtatgaagctgtactgtttttttgtttgtttgttttaatcagtggcttcatagtagccctttcacagagctgggtgctattttacttcagaggcagggttttaaaaccttgaaagtcccttctagcacttttaagacctgatgtgaaaatggagtcgtatacaacacaattaggaggtaactttgttccagggaggggttctgagatgccattatgtcaaagcacttcatgccttctcactgctgcacagtaagcgcgactggctgtgcccatattttgttttgttttgttttgttttgagaaagggtctcactctgtcacccaggttggagtgcagtggcgtgatcttggctcactgcagccttgacctcccaggctcaagcaatcttcccacctcagccttcgagtatctgggactacaggtgtgcactgccatgcccagctaattttgttgattttctgtaaagacaaggtctcactatgttgcctaggctggtcttgaactcctagactcaagcaatccttccaccttagtctcccaaagtgtcaggattacaggcgtgagccaccgcacccttatgtccggcctgggtatgcccatatttgacttgcatactgtcttttaggatcagatctgttattcaaggccaggagcacctagattctctaaacaacccctcagagaaagttgaactctcagaggctgagtctgcaagattcagcatcatcttaaggtcactgcatctcttagacattttgactatggagaatgacattatttctgtctttctcaatccctggatgctgtgaaatcataaaagaatgttagaggctgggcgcggtggctcacgcctgtaatcccaacactttgggaggcccaggcaggtggatcccttgaggtcaggagttcaaggccagcctggccaacatggtgaaaccctgtctctactaagaatacaaaaattagctgggtgtggtggcatgcacctgtagttccagctacttgggaggctgaggcacgagaattgcttgaacctgggaggcagaggttgcagtgagccaagatcatgccactgcactccagcctgggcgacaaagcgagactccatctaaaaaaaaaaaaaagaatgttagagtggttaggtattgttaggtatgtatgtggagtttagcaatctagtccagccccttcattcgagaggtgaggaaacaggctcagaggactcactgaaagatggcagcagagctccagtgaggtttataagtttcttaaaagttgtgcagttttggggtcccatactttttaggtcaaaatcattctcatggcttcagcccctatcaaaatgctgaaggctcccaatctgtatatctagcctagcactgtctcctgccatccaggcccattgtatgtctagcctagcactgtctcctgccatccaggcccaataaccttctgcccactgggatgctcacagccactcagagcctgctcttgccttccttatctcagggaagccagacccctgggagttatccttgccagcagccactccctctcacttacagccaggccgtcccaaagcctttggatcctgcctcatcagggtctcttggactcatctactctgccctccccaactagggaggaggcctagcccaggcctagacccctgcagtggcttcctgtcatgtctccctccatcctgccagtcctttgccatgcttcccattgcaggggagtaatgtttctaaaacacacatctgattgtgtagcctcatgctcaaaagaatatgtcagtggttccccgaacttctcaggatcaagaagtttagtctccttgacagggatttaggtcaacttcatcacttcccaccttcccctcacaaaacaatctttttttcttacctaattcctattttttaacttcagctgtctgtgtatctggccctgcagacagaaagctttctctgactccctctaaaagtctgaattctctgactgggcgctgtgctcatgcctataatcccagcagtttgagaggccaaggcagaggatctcttgaggccaggaattcaagaccagcccagacaacatagcaagatttcacctctacaatcaatcagtcaatcaaccaatcagccaagtgtggtggtgtacacctgtagtcccagctgcttgggaggctgaggtgggaggattgcttgaactaaggaggtcaaggctgcagtgagctgtgatcgtgccaccgcattccagcttgggtgacagaactagaccctgtctttaaaaaattttaaaaaatccccacagagtctgaattctatcccatcagtgtgcctctcccatgaattactgtgtcctttcctcatgatggcatctggcgccatatggttaaagcctgcttgcttgtctgttttcctcagtggactcggagctttgtgattcacactcacattgcatccccaggacctaacataaagggtctgcttaatatgttctaagtggggttaatactttgtagaaacaagcaaaaaaaaaaaatttgttaaagctgaaattcatgtatctgaagaaactgtatcttcagtgttaccaagaagcctctagtgaagctgccccagtccctcaccagtgatggatgggcacagctgagcacagtgtattttttcccagagtttgtcccttttggctcagtcctgagctctttatctttcacaggctcccctgtgaggaattatgttctgagagaaaccgttcatgagatggattctactttgtttctcactcaggccatggagagtaagttgcttgttggaggaaaaaatatagtagatcatacgaatgaacagcagaaaatcctggagcagaaacgacaggaaattgcagagcaggtaacttttcattctttttcagggagaatgggtgaggtaaggtgtgtttatgctgcagagcaaacgtctcatattagactctcttcaaagagaatgagagcaaggtgtgtctgcctcatcctagctggagactctgatcctagcttggggaacccagcatagacacagtctctagggcaagctgatgaattttgtcatgttgctcagaaacgtcgagaaagagaaatccagcaacagatggaaagtcgagatgaggagaccttggaacttaaagagacatacagctcattgcagcaagaggtggacatcaagaccaaaaaactcaaaaaggtatgaaaggaatgaggccagatggagttgccttgagacttggggaaagggagaactctaccctttggacagacaccctcctcacctgcctctcccctcattccagctcttctccaagcttcaggcagtgaaggctgagatccatgacctccaagaagaacacatcaaggagcgccaagagctagagcagactcagaatgagctcaccagggagctgaaactcaagtaagtgccaggccttccatagtgcccccaagccacttgctgagtcattgatctcgtttgtttagttagaaacagccctggctgggcttggtggcctacgcctgtaatcccagtgttttgggaagcggaggcgggcagatcacctgatgtcaggagttcgagaccagcctgaccaacatggtgaaaccccgtctctactaagaaatacaaaaattagctgggcgtggtggtgcatgcctgtagtcctagctacttgggaggctgagataggagaatcgcttgaacccgggaagtggagattgcggtgagttgatatcgtgccactgcactccagcctgggcgacggagtgagaaaaaaacacaaaaaaagaaatagccctgaggacaggtccttctccagctcatctcctgccaccccatgttctgttcattcctgaaaaagtcactttccatctctggatcccatctgttaactgaatgacttcatcaggtgatctccaagttcccttctaaccctaccttctcgaagcttttaaagattctggtcttacatctgtctgatgataagagggaatattttattaacttgactttttattgtgacaattttctgaatggtataataaatacccaagtacccatcacccagattcaaggattaacaagcttttgccatctatctttcacaaaaatattttaaagcaaatcttaacctcatgttatctcactcctacatacttatatatatatatatatgatcacagtggttttttttttttttgagacagagttttgctctatcacccaggctggagtgcagtggcacaatcacagttcacagcagcctgtaacttgtgggctcaaacagtcctcccaccttagcctcccgggtagctggaactacaggtgtgtgccactatgcccagctaatttttaaaaaaaattttatagagatagagtctctctatgttacctaagctgatctcaaactcctaggctcaagcaatcctcctgtttcagcctcccaaagtgctgggattataggtgtgagccaccacacccagcccacaatactgtttttaaaaaagcttaattgagacatacttcacataccatacaattcacatatttaaagtgtacaaatcagtccgggcatggtggctcatgcctgtaatcccagcatttgggaggccgaggcaggtggatcacctgaggccaggagttcaagaccagcctggccaacatggtgaaaccccgtctctactaaaaatccaaaaattagctgggtgtgatggcgtgtacctgtaatcccagttactcaggaggctgaggcaggagaatctcttgaacctgggaggcggaggttgcagtgagctgagatcacaccactttactcaagcctgggtgacacagcgagattcttgtctcaaaaaaaaaaaaattaaaaaatgataaagtatacaaatcagtgtttttttaaaagcatatatatgcatagggctataaaaccaccactacaatctaattttagaacatttttattactctcctctaaaagaaactctaccagttagtagtcactcctcattaccccctttcccaacccgaagtaatcactaatctgcttcctgtctctatggctttgcctattctggccatctcatataaatggaatcacacactgtgtggcctttttggcctggtgtcttttgcttagcatgacgctttcaaggatcgtccatgccgtagcatggatcaacagatatctggtagtcccaacatcaattgttctttattatgactgaataatattgcactgtatgaataggacacatatttatttatttttcagtttatatacattccgattatttctagtctttggctattatggataatacttctataagcattcatgtataaggttttgtatggatgtgtgttttcatttctctgggatacattcataggagtggaattgctgggtcatatggtaactcagtgtttaactttttgagagaatgccaaactgtttgccacagtggctgcactattttacatttctaccaccaatttctccacatcttcttttttttttttttctttgagacagtctcgttctgccacccaggctggtgtgcagaggtgcagtctcagcacactgcaacctccacctcctgggctcaagcgatcctcccacctcaacctctggaatagctgggactatagcggcatgccaccctacttggctaatttttgtgttttttgtagagatggggtttcaccatgttgcctaggctggtctcaaactcctgggctcaagcagtctgcccgacttagcctcccaaagtgctaggattacaagtgtgagccaccatgcccggcctctccacatccttgtcgacacttgttatttcctgtctcttttatcatagacatcctaacgagtgtgaaatggtacttcattatagttttgatttgcatatttctctgatgactaatgatgttgagcatcctttcacgggcttattggccatttgtatgtctttggagaaatatctatacaaatcctttaccccattttaaaatggggttgtttcatatatatatatatgtatatatttcgtatatatatgaaatatatatatttcatacacacacacacacacatatgtgtatatatatagtttttttttgttttgtttttgttttttttttttttttttttggagttggagtctcgctctgtcatccaggctggaatgcaatggcgtgaacttgactcattgcaacctctgcctcctgggttcaagcgattctcatgcctcagcctcccgaatagctgggaatacaggcacccgccaccatgcccggctgatttttgtatttttagtagagatggggtgtcaccatgttgcccaggctggtcttgaactcctaacctcaggtgatccacctgccttggcatcccaaagtgcttggattacaggcatgagccaccatgtccagccaataattaagttttaagagttttttttgagacagagtctgggtctgtcacccaggctggagtgcaatggcatgatcttagctcactgcagcctctgcctcctgggttcaagtgattgtcctgcttcagcctcccgagtagctgggactataggcatgtgccaccatgcccagctaatttttgtatttttagtagagacggggttttaccatcttggccaggctggtctggaactcctgacctcaggtgatccacccgcctcagcctcccaaaatgctaggattacaggcgtgagccactgtgcccggctgagttttaagagttctttatattaatatattatgaataccactttctcatgagattcatgatttgaagatgctttctgttattctgagttgtttttaaactttcttgatggtattacttatagcacaaaagatttccgttgtgatatagcccaatttaattgtattttcttttgtttattttacttttggtattgtatctagatttgccttttctggacctttcatataagtttataaatgaaataatgttggaataatgtggccttttgtgactgctttcttcatatgtgtgtgtgtgtgtgtgtgcatgtgtgtgttttgttagtttttttttttttttagagataaggccttcttctgtcaatcagactggagtgcagtggtgccatcatagctcacagccttgacctcttgggttcaagtaatcttcctgcttgagcctcctgagttgctaggacttcagttgcatgctagcacacctggctaattttttaaaattttttcataaggatgggtcttgctgtgttgccaaagctagtatagtgttttcaacagtcttccatgttgtagcatgtatcaatactttattcattttttatgaccaaataatattctgttgtataaatataccacattttatttatccattcattatttgatggacatttgggttatttctacttttgggtgttatgaataatgctgctgtgaacattcatattcaagtttcttttgtggacgcatgtttcattctcttagatcctctaagaggcttatagtgttaggtcttacatttaggtctatgatccatttgagttaatttctgtgtatggtatgaggtagggtttcaagtacagtgttttggatgcagatatctagttgttccagcaccatttgttgaaagggcttttctctcccatttcattgtcttggcatacttattgaaagtcagggccgggcgctgtggctcatgcctgtaatcccagcatttgggaggccgaggtgggtggatcacctgaggtcaggagttcgagatcaccctggccaatatggtgaaaccctgtctctactagaaatacaaaaattagccaggtgtggtggtgcacacctgtagtcccagctactcaggaggctgaggcagaggaatcccttgaacctgggaggtgtaggttgcagtgagctgagatcatgccactgtactccagcctgggcaacagagcaagactctgtctcaaaaaaaaaaaaaagaaagtcagttgaccgtaattaagcatttatttatttatttctggactttcaatactgttccattgttctatatatctatcctcatgctagtaccattctgtcttaattactatagctttgttagttttgaaatcaggaagtgtgagtcctccagccttgttctttttcaggagtgttttgactgttcagggtcccttgcatttccatattcaaacatactttgttttactgcactctgctttgttataattcacagatattacattttctacaaattgaaggtttgtggaaaccctgcataaagcaagtctgttggcaccattttttcaacagcatatgctctcttcatgtctctgtgtaagcatttattagcaataaagtattcttaaagtctatactttttgtagacaaaatggtattatacatttaatagactacagtatagtgtaagcataacttttatatgcactgggaaaccaaaaaattgtgttacttgctttattgtgatacttactttattggagtagtctggaaccaaacccacagtatctctgaggtatgcctctacattttaaggtcagcttgtcaatttctgcaaacaaagccagctgggattttgatattgatcacattgaatctgtagatcaatttgggcaatattgtaatcttaacagtattaagtattcagatccatgaacatgagatgtctttccatttatttattatttctttaatttttctcgagaatgttttgtagttttcagtgtataattcttacacttttgttaaatttatacctaagggttttttgggtgctatggtatatgacattgttttcttaattttatttttggaatattaattactagtatataaaaatactggctgggcatggtggctcacacgtgtaatcccagcactttgagaggcccaggtggacggatcacctgaagtcaggagtttgagaccagcccggccaacatggtgaaaccctgtctctacaaaaatacagaaattagccaggcgtggtggcgggtgtctataatcccagctacttgggaggctgaggcaagagaatcgcttgaaccctggaggcggaggttgcagtgagccgagattgcgccattgcactccagcctgggcgacagagcgagaatccgtctcaaaaaaaaaattttatatatttatatatatttatatatatatttttatatatttatatatatatttatatatttatatatatttatatatatttatatatttatatatatttatatttatttatttatatatatttatttatatatatatttatatatatttatatatatatttatatatatttatatatatatttatatatatttatatatatttatatgtatatttttatatatttatatatatttatatatacatattcatatatatttttatatatttatatacatattcatatatatttttatatatttatatatacatatttatatatatacatatttatatatatacatatttatatatatacacatatttatatatacatatatttatatttatatatatttatatttatatatttatatatttatatttatatatatttatatttatatatatttatatatttatatatatttatatttatatatttatatatatttatatatttatatttatatatttacatatatttatatatttatatttatatatttatatttatatatttatatatatttatatttatatataattgatttttgtctacacaatgatatttttatacctaaaaaaattaagtttcttagtattttctagtacccaatccacattcagattttcttggtttgctcgttttaagatctacatattaggactacatgttacatttggttattaagtctcttagacttattttaatctgaggcaattctttttattttttattttatttatttgtttatttgagacagagtctcactttgtcgccagactggagtgcagtggcgcggtctcggctcactgcaaactctgcctcccaggttcaagtgattctcctgcctcggcctcccaggtagctgggactactcgagtagtgagccaccacgcccagccaattctttttatttttaaaaatatttttcagccgagcatggtggctcgtacctgtaatcccagcactttgggaggctgaggcaggtggatcatgaggtcaggagttcaagaccagcctggccaagatggtgaaacccccatctctactaaaaatacaagaattagctgggtgtggtggcgggcgcctgtaatctcaactactcgggaggctgaggcaggaaaattgcttgaacctggaaggcggaggttgcagtgagccaagattgtgccactgcactccagctggggcaacaagagcgaaactccatctcaaaaagtatatatatacatatttttcatagttgacttgttgaaaagactgaatcagatagcctgtagaaatatcccacattgtaggcgggagtggtggcatgtgcctgtagttccagctacttgggaagctgaggcaggaggattgcttgagcccaggagttcaaggctgcagtgagccaagattatgccactgcattccagtctgggtgaccgagtgagacaccaactcaaaagaaaaaaaaaaaagaagaaatatactacattctggatttgttggtctctttcttcatggtgtcaattaacttgtatctctatcccctttatttagctctaactgaaagctatctctgaagcacgggttcccaaccttggctacaaactgagaagttttaaaaattaatgatgtctgagccccacctcagagattctgatttaattggtctagggcagtagtccttaaactttagcaggcatcagaattacctgaagggattgttaaacacagattgctgggtatcacacccggagtctgattcagaaaggctggggcagggcctgagaatgttcatttctagtaggttccaggtattgcttctgctggtttggtgaatgcactttgagaactcttggtctctcatgaggtctgggcaagatatttttcaaaactctgtaggtaacgttaatgtgcagcctggcctgagaaatgtggagctaatagtttcagccaacagatgatctttgtctggatccattatttcattagtggggttacaaaatgaccatgcctggccaaagaagaagttttcaaagggattcttttaatgatcaaattttaaatttggaaaagagcccttaaaattaaatgtaggcaaggtgcggtggctcatgcctataatcccagcacttttggaggctgaggtgggcaaattgcctgagctcaggagctcaagaccagcctgggcaacatggtgaaaccctgtctctactaaaaatacaaaaaaattagctgggcatggagacatgtgtctatagtctcagctactccgggggctgaggcacgagaatcgcttgaacctgggagacgaaggttgcagtgggctgagattgcgccactttactccagcctgggcgacaaagtgagactctgtctccagaaaaactaattaattaattaaatgtgtgtgtcggtcagtcctctttgcaggtatgtacatctagaaaaagatcaggacaaaatataccaacataataataatagttatctctggatagtgaaattgtgggtgattatgttttttacattttctttttgttgttgttgttgtttgagacagagtattgctctgtcacccggattggagtgcggtggcacgatcttggctcactgcaacctctgcctcccaggttcaagtgaatttcatgcctcagcctcccaagtagctgggattacaggtgcaggtcaaccacgcacggctaatttttatatttttagtagagacagggttttgccatgtttatcaggctggtctcgaactcctgacctcaggtgatccacccacctcggcctcccgaagcactgagattacaggtgtgagccactgggcctggcctgttttttacattttctaatgaataaatagaatcattgtaaccagaagaaagccaaatatgtgttataaaaaatagtttctgaaatgtcaaagagaaaattttagctccccaaaatatttttttttctaaggagtctattttcattattatctctctctctctctcttttttttttttttttttttttttttttttgagacagagttttgctctttggcccaggccagagtgcagtggtgtgatctcggctcactgcaacctctgccctctgggttcaagtgattctcctgtctcagcctcctgagtagctgggattataggtgcctactaccacacacagctaatttttgtatttttagtagagacagagtttcgccatgttggccaggctgttctcgaactcctgacctcaggcaatccactggctcggcctcccaaagtgttaggattacagacatgagccaccgtgcctggcctatatctctttttatatcttttgagtaaacagtgagtcagcctctttctcacagtaccctatacctctgtgctgtttgctttgtgtcccttccatgttcatttccttttggcattgttttgtcctgaggctttagaagagtaaaggcagagatataatgggagacagtcatcaccatagagagacaccaccagtgggttccagtttccttgtttgatgtgtttcctgggcacttgtcagacagagactgttagtaggaatggtcttcattctcaggggctgaaatccacttagtcctgctttttatcctggtcagttagaatgggaaattttccagcttggacaacgagccatgggattggagtaaggcagtttaatttcttctgtttttggcattttggaagttaatgaccttggttatcagcaccagtggccctctgaaagatacttcaggtagcaaatgttcactccaatatagcccaggggtcacctccctcttgagcctgttcacatcctgccccttcccaggcagaagtgacctctccatatttctaagacagaccactgtcagtacctattatacctaacagggctgcaccattaccctttgtttcaggcaggagccagatgtcatttgtgtctgtatctcagctctttgtatgatgttaggcccatcgtacttgctgagtaaatgtttgctatgtgccttgactcttacctgattactcaccatgcatgagaccagatagctgacacttcatatgtattctgtatctgttttcacctgttatgtgtgctcttacaggcatcttattatagaaaactttatccctctggaagaaaaaagtaaaattatgaatagagccttctttgatgaagaggaagatcattggaaactacatcctataaccagactggagtaagtcactattaacttcaagtatattttcaagtatgagggaggaaaagaatgttgataacaagagccctctggtcaacaaaggggtttgataagaacacagtttggcttatttaaactcaaaacccactgcattactgattttctagctgccatagatccaccaggtaaaagtttgatcatgagtgtggttttaggaattgggagactttgtcactagtgagtgagcaagtgacctttccaaagttcctgcatttctgtttctccagctgtgaagtgaagtatgctaggtcacgtaaggggcaattcagagctgttatctttgtgtgtcattctgacccacagtgttgagaaggattctcatgctaagtctgggtgctgctggaaagatgggagacacctggcagggatgcagaggtggggggtgttgacagctatgctttgtgaatgctgtctaagaactgggtgatgattaaaaatctcttctggcttaaaagatgcatgatgctctgaatcagaaagcaactcaagcagaaaacagaagcatttcccgtcccacttacgtcagcctgcagtccagggagttacttgcttcaggttctgtcagtgtcttccgagtgctggttccacaggactccagccagggctttaacactgcagttcatttccaggaaccagcagatgatgaagcggccagtctcagccgtgggatataagagaccattgagccagcacgcaagaatgtccatgatgattcgtccagaggcccgatatagggtgagaagatccttcttgggtttttctcctgtctcttttggagtctagatttgtgtaagcccttagatactattccactcagagttcataccttctttccagaggtacttgaagacatttataccaataacaattataacaaataataaataaataagccgagcacagtagctcacacttgtaatcccagcagtttgagagtccaaggtgggcagattggttgattcccaggagtttgagaccagcctgggcaatgtggcgaaaccctaactctactaaaaatacaaaaattagccaggtgtggtggtgtgtgcctgtagtcccagctacttgggaggctgaggtgggaggattacctgagcccaggaggcagaggctgcattgagccaagatcatgccacagcactctagcctgggtgacagagtgagaccctgtctcaaaaaataaataagtaaatataataaaaataataactaataggccgggcgcagtggctgatgcctgtaatcccagcactttgggaggctgaggttggtggatcacctgaggtcaggagttcgagaccagcctggccaacgtggtgaaaccccatctctactaaaaacacaaaaattagctgggtatggtggcaggcacctgtaatcccagctacttgggaggctgaggcaggagaatggcgtgaacccagcgggtggagcttgcagtgagccaagatcgcgccactgcattccagcctgggcaacagggcaagactccgtctcaaaaacaaaaaacaaaaactaaaaacacaaaaattagccgggtatggtggcaggcacctgtaatcccagctactcgggaggctgaggcaggagaatcgcttgaacccaggaggcaggaggcggaggttgcagtgagccaagatcgtgccactgcactccagcctgggtggcagagcgacactctgtctcaaaaaaaaaaaaaagtcagtactagagaaggagagtacaaacatcctgtctgtcatggccagtaaatattaacaatgaacttcaaaatggctctgtgggaaggctggagagaacacagatgtgtagtgacaggagatggacctgtcgtaaagaacttcaggtactttcatctcacaaaatgtgtgtcagtcatgtagtcatttaaagggacatcattgaggactatttaatgaccccaaaatagaaaaatagaaactctgccatgagagcctctactttttaattaaattaaattaattaattaatttgttttgagatggagtctcgctctgtcgcccaggctggagtgcagtggcgcgagctctgcttactgcaacccctgtctcctgggttcaagcaattctggtgcttcagccttcctagtagctgagactacaggcacatgccacgacacccagctagtttttgtatttttagtggagacagggtttcaccatgttggccaagttggtcttgaatgcctgacctcaggtgatccacccacctcggcctcccagagtgctgggattacaggcatgtgccaacacgctcagctaatttttgtatatttagtagagacggggtttcaccatgttggccaggctgctctcgaactcctgacctcaggtgatccacccgccttagcctcccaaagtgctgggattacaggcgtgagccaccgcactggccttttttttctttttttttttttttttgaggcaggatctcactgtgtcacccaagctggagtgctgtagcacagtcatagctcgctgtatcctcagactcctcggctcaagtgatcctcctgccttggcctcccaaagcactgggatgaccatgcccagctgagcacttgctgtgtgctgggcattgtacccagcacttgactgctttctctaattaagtttccccatcttctctatgcattcagtcctgttgcttaaaggtcaagtagtggggcaagtggctgaactaggatacacaacgtattaagttatagagtaatttacaccagaagtatatatatgatataaaatttgatgtaaaatatattgaaatgtaaactgtttttctctggttggtggaagcacactcaatgttttttttctttttgctcatctgtattttataactatcaatagggaacttgtattatttttatagtgaaagattttcacttgaaatatttttagatgtttctgagtctctcttggcagccagagccaaacagaagattacggttagttagctctttgggtgccattcttcctggctttgagttatttaaaagaaagaaagcaaaagcaaaaaattaggtggagttaggtgttgtaaaacggcatcacttctttcaggcaggctctttcttgataggccctgaataacaagcaatttgcacttctattcttggaggggccctcgattgcttgtactgcctgtgtccagttggaggctaacctagctggtgatggctgtgcttctgcaggcagaaaacattgtgctgttagagctggacatgcccagccggaccaccagagactatgagggtccagccattgcccccaaggtccaggctgcattggatgcggctctgcaggatgaagatgagatacaggtggatgcatcatcatttgaaagcactgcaaataagaaatccaaggccaggtgagtggctttgatgacgtgtgtttaaacagaacatgtttgaacaaggacaaaccaaagcaagaatgcttgtttatcatggaatactttgcagaacacactagaaaatattgccatattactcctatgtttacttatttattctacaaatatttatggttgagacactatgctgggtataccgaataccagaatacctaatgtccccagtcccttactataaggtgaatgtgttctagtgaaatagcagtcagttcttctgttctcatgaggtgtccggtagttctaagtgctttacaaacattctcttaatgatttcctgtaaaaacttagaaggcaaatattataatcagtcccattttatagacaagaaaactgaaacttagagaatttgagaaagtagccatctctaaggaaacccagcaagtaagggccaaagcaagaattcaaaaataggtcaatccagatccacaacccagtctctgggcctccatgctaagtttacctcacccatgtggtgcaaaactagtaattctgtcttattacatcctggattaaaagttgtaggaaaacaattgggtggaaaaccaaaatggaagaaattctacctgcaaacttaatatttttttatcaatcagggaaggacagtacagtcaagctttggttttaaagaagaacaattgctaagcatcagagtctccttctctcaggttccacacctctgttctgaggccattttcaccatccccaaaggttcaggctgtgccagtgtagtggttttacagttgaacttgtcgttttcaggccattgaagaatggcctgaaatgaaatgttaatgacatctgatgtgtcagggacagagatggggacatgtaatataaacatgtgtttgacttttgcaggcctaaaagtggaaggaagtcgggatcctcctcctcttcctcaggaacccctgcatctcagctttatccacagtctcgggggctggttccaaagtaaagccagcttctcctctcccagggcggaaacagcatttgccttctgagagaagagactagcaaaaagctgcagagaggattcggcccaaactcagaactgttcccctgaggagaagcggtggcctctttgcagatcaaccaacttaatctggttgaacgtgctgttcctaatctggcactcagcccctctgggaaacatcttttaattagcatctcagaaatgcatgggtaaggtaaagtgcgatagttcaagtggaaagcaagagaatgaccagtgaccttgcttccttcccccttgccttcttctcccccttcccctgtgctccctttctctcctctctccttttctagcctgttctttacatggggctcccttcttgttgaacaatagggcagaatcaggagtcaccttagcaggaccacatctttggagcctcgggataaaatgacagtgaggttgaaaagtgaaaaccctagaacttgaataggtgcctgttcttgtagggagaaatgagaaatcgcatttggatccaggccccaggtgggcaccatcagcagtcttgcttccatgcacctcagtaagaagtggatctgcctttgggacctgctcagtgaggaaatctcttccaatttctgcttctgaatgattcaatgttgggagcaatagaaataacattccctttgccttctctgagtgtttagggaaatagcttctttaaaacctcaaaaccatgaccatcctgtcaaagacctaagtctgtaagctggtgccatgtccatacaccatgtcactttactcttcatttgtcaccatcttttcccatgcacgcatactctgaacatccttgtgtgggcccatcctctgcatccagagcatgctctgcagtgggcctgttttgtggaagaaaggaggctgtctctgccttctctgatgggactggagttgagggaaggagctgtattgtggcacttctgaattccccgttttgttccatattggtatagagagcagaagagtagctaggcagatgcagagatggagacatgagactcagtgcagtgggcagggaagacataacagatggaagcaaaggaatcctgcctgccttcagcagagaattcaccgaatcctagaactgtggctccctccaggcagagcctaagatgctggtgaagaatagctgtgtgattgaataggctcaaaggagagttcagaattcccatttacatattactagtttggtttgtaagttttagttccttgtattattgagattcagagcttcattttatgttggtcattaggtgaatattactcattttccctcaagagaagctcataagtgtgtgtgggtgtgagagcacgatggtgcctgtgttctgtgaatgtgtccatatgtgtctgtaagagagacagagaccaagaacttgcccaattttagaaatacactaatgtgcagttgttgccttttgtctgtattgaaggcccattgaatgactaatccaggctggaagcattcccatgtgggtgtctgagtccatgagccaagcctgaggggacagtgagtctccaggtctgccacactggtgcaccttgctggcacggtgcctcaggaaggtggcgactcaggtgggccttgagttatattttaactcagctgctcagttcccagggcacatttctggatcagaacccatgggaaacaggaggtactaagtgcaatgtcttagcattctgcaaaatggagatctgttgtccagcggcttatctcctttttagtaacccttctttctgaacccagggcccttttcagccttccctcatattttcttgagatcaaactttacttctttcttatttactaagaatttgcctgtttgaataagaacaaaacgctaaggtgggtagcctaagctgattttctgctggttacacgtgtctctcacaccacatttcctcaaagctaatctgaattctgtaggctaaaaatattcatgtagcaaatctgagaattgaaaactgcagataaccggccgggtatggtgactcatgcctgtaatcctagcactttgggaggccgaggtgggtggaccacctgaggttaggacttcaagaccagcctggccaacatggtgaaaccccatctgtactaaaaatacaaaaatttgcctggtgtggtggtgcatgcctctagtcctagctactcgggaggctgaggcacgagaatcacttgaacctgggaggcggaggttgcagtgagtcgagataacactactgcattccagcctgggtgacagagtgagactccccctcaaaaaaaaaaaaaaaaaaaaaaaaaacagaaagaaagaaaaagaaaactgcagataaccctatacattaatactggtatctcgaggtgactcttctgaccaagggtggttaagtgacacatagaacttttctaagagaagacagacaagttgacaggcatgccttgtactcagctgtgttcatgtggtggtctgtggaaagaaaagaagactcatttggaaatgaagctgtccctttccaagcagtctctggtgcttttcttctctcaaaatggatccgataaatatttgaatagagcagattgtagaatgtcgtgctgtcaccagaaagctgctgttttgggttctgcattgagccaaatatgtagaggacctaccaagcccactgagggactaggttttcatgtctctagtcatacctagaatgttctgagccgtctgagggccttcatgccggcagcagctagcaaagccagaaagcaagtctaacaggatctaagatgaccatcaggagaaggagtttgagactgtgtatgcaacccccaatagacccccttttactctgatctggagaatgtatctggcttcatattttcaagtcacatgtctctcagacccctggattcagaacccaaggccacaaatcataggcatgaagcactttcttaagactgacctaacgctggattatttcccgtccaatgcctgcatgctgcttgaattgctccacccacacctccatgaccaagggcgccagagtgctgcaactggggcgtgggccgctctctgcttttcctgtctgactctgacaagtcctccctcactgaatgtagaatcgttgccaagtttctgagaagtgtcgattccctgttaacatggatatcagttctgcctcacatttcccacttgaggttgaggcgtactggagacaacacctcagaccatctgaaccccatcagtggacgaaaatggggctgttaatatactctaaaagccatactaaaaatgctctgagggaactggctaagaatagtgggcctggtgattgtctatcacgcaaggctttgttttgtactgttcagaaatctgtcacctttctgcctgcccttgtttcctgaatgaaatgcttctggggttatttatgaaaggagtgatcctggggcaggcaggaggcagtgggcttcatggctccttgaagttattactgatcttgaccttctctttggctacctttagacaaagaatacgccaatcaatacttggggctctaagttttacaattgatatttatttgtatcatctctttgtctaggaatgtaaaagtgattctaaactaagatgtgtaataaaaatcaatcagatttattgtacctacaaaaaggtgtcctcataaatgactaaggcttttgaaaatgacatgcctgtggctgacacactgccattttcaataaacattttaactgggtgggagtgggaaaatgaagattgagttgggatgctggcattatttaatatagcaacaaggggcagggtgcagtggctcatgcctgtaatcccagcactttgggaggctgagccgggtggatcacttcaggtcaggagttggagacgagcctggccaacatggtgaaaccctgtctgtactaaaaatacaaaattgagtcgggcgtggtggtgcgcacctgtcatcccagctactcgggagactgaggcaggagaatcgcttgaggccgagattgcagtaggccaagattgcacaactgcacttcagcctgggcaacggagcgagactccgcctcaaaaataaataagtaaataaaaataaataaataatgtagcaacaaggaaaaggacacaaaatgaagaatgatagagtgacaaataagtgtttttcatgtttttccgtggaggttcctgagactggcctgggcaacggcatgaaatttcttttaacttttgtgttttgttttaaaaattcttttaaatttactattatacatcatactttaaaatatatgtgcctttttttttttttgagacagggcatcattctgttgcccaggctggaatgcagtggcgtgatcacggttctctgcagcctcagcctcacaggctagtgatcttcccacctcagccaagactacaggtgtgcaccactatacctggctaattttttattttttgtagaaatggggtctctctatgttgcccaggctgatctgtgccttttttaacactaaagtattttatgttgtttaccatcaggaaaagaagatacaaaaaatgggccacacattgtcttttggatttccatgctcgtaggcctgctggagtgaccctggggggttgtgccccttagttgagaagtgggactgggtggaaggagcacagaccctggattccaagctgggtttgaattctagtattgccaccacttactagccatatgactaggaggaatttaattgacctctctgaactttggggcctttgtctgtaaagtggagtgattatccccactttgaagggccattttgaggatcagcgatacatttaaagcagcaagtacagtatgggatagagcaaacgtgaaaaaaatgtggttattgctgtgataaggcactgtgtttagaagacaccatgaacactttgtgtcccgagaaactagaagtcagtattggacataccatctttagaaaatcctaaagaaaagctgttaactgtttagtaatgtgtattgagtacctactatgtgtcaagctgttctaggcactagatatatagacgtaacaccaggaacctgcctacatggaacttgcactttaatggggatggaggatgggtaaatgttaaattaaccaaatgcacacaaatatatgattatgaattgtgtcaaatgtcatgaagttataataggtttttgtttttatttttgttttgagacgagctctcgctctgtcacccaggctgaagtacagtgagtggcgtgatcatagctcactgtagcctcgacctcctgggctcaaacgatcctcctgcctcagtcccccaagtaacggaccaaggtgcgaaccaccatggctgactaattttttaaaattttttatagagataggattttgtcattttgcccaggatggtcttgaacttatgggctcaagtgatgctcctgcctcagcttcccaaagtgctggaattatatgtgtgagccaccctgtgtggccaatataatagaatattataaaaggagagtggagacctaatttagatggggtgggtaaagtaggaaagggctctttgaagaaatgacagttacagtgagatctagaggacaggagttagctgggcaaggaggagggaagggcatttgtgaagggatgggggaacagtgtttgcgagggttttgcagaacaaactcaaatttcacaagaaggtatctgcagtccctttttaccctcactagagggtagcatggagaactgtagaaaagattacagtctaggactttaaagatagcaacaaaaaatgtaaagagcacaaaggggacagtggcctgtgcgactcgggcaaacgtttcataattgtgtttcttcataagacgctttcaaactatgtgtaatgtctgtttactccccacccttccaaaaagagttaagaaacagcttggcttagcctcagtaattactagtttagaatagttcagaatccattacccagaaagcaagaattcaaagtaggatttgaagaactgtgagtgtgttcttgaaaatgacagaatttgctgggcacggtggctcacgcctgtaatcccagcactttgggaggctgaggtgggcagatcacctgaggtcaggagtttgagaccagcctgaccaacatggagaatccccgtctctactgaaaatacaaaattagccaggcgtggtggaacatccctgtaatcccagctactcaggaggctgagggaggagaatcgcttgaactcaggaggcagaggttgtggtgagccgagatcgctccattgcactccagcctgggcaacaagagtgaaactccatccatccatcttaaaaaaaaaaaaagaaaagaaaatgacagaattcttggttgggccagaggctaattcatcaggggaaatacaggacagacggggcacctggcaacttggaaattcctaccaactcagctttgtttttatcttttggatttttaaaattttaatcaacaaactactgaattttggaaactgtattttgaacttcagactgataatttaagtcttgggggctgtgattttggcaggccctcttatattagagttaccatctgattgaagcttaccctgagattctggtctccaaggaccatgtggtggtcacatctgccaactgggtcgttggtggcatttgtcaaggacgtaactagctcttgcagctgctcctgtttcaacctccatttctttcactagtcttgtggttaaccggtccctgggtgcttcagttaggcgtgccaactggggacttgctgttgggctggaggaatgggcagagggagcgatggctcaccgcatctctggggacggtgtagcccacaggcacttgttgagtgccctctatgcaccaggccttgccctgcactggagatagggaggggagtagatgtaccatggcccttctgaggagaggggagacagaaacacaaggatggcaattcagagcacttgctgcataggaggcctggctcctctcctcacacagccctcctagtcctctgaggccggagctacacaggcctccatttggttcctgggttatgccatgtgctttcctgcctggcaccttcacaccttcacacatgccatatgccttctgcctgaaacattttctcctcattctttgctcggctaactccttctcatccatcaggaaccagttgaatgtcacctcctcagagaagccttccccagcccttcgttgtggttttccccatctccgcctcccaggttcaagcaattgtcctgcctcagcctcccgagtagctgggactataggctggtgccaccatgcccagctaattttttatatttttagtagagatggggtttcacccgtgttaaccaggatggtctcgatctcctgacctcatgatctgcctgcctcagcctcccaaattacaggtgtgagccaccgcgtccagccacaaaaaaaattctttaattcgtcaggcatagtgacatgaacctgtagtcccagctactcagaaggttgaggttggaggctcacttgagcctaggaggtcaagggtgcagtgagttacgattgcatcactgcactccagcctgggtgacagaggaaggaaggacaagcatgccagacaaaggggacaacatgaataaatgcaaggagagttcctggtgactgcggaatctgatgggcctggagtgatggaatggggatggagaacggggctgggagggtctcgactccatggctcaagttagagggagagcccttggaggcttttgtgtgttttggagaccaggggagtgaagcgcagcctatttacactcgagtattttccccttaagccagcctggcatgctattatttctttttgagataacagaaagcaatttcactaagtgcctgctttaagtttgcctgctgttcacacagctttctgggcttagttggcaaattgcattctgccaggagctttccctggcacagctcactacccaaggaattctaaggagcacttgagcttgactccaaggtcttagttccctaggaatggggcctagtcttttttcagggcagtgggctggaaggtggcccctattctgcatttggcagcagagaaattaaacttctgccattggtttggggatttgtttttctgttcagtcaacaaaagattaaataacctatgctgttcaagactctatgtcatgggctacagcagccatgaaccctgcccttccagaactctcagtctggaggaaattctggccattcacaaataagtaaatttaaggtgagcagtggcacagatacagcacaaaggaggcgtcacagatttccataaggggctttgttaatgcagtgatcaccctctgctagattattccagggacagtgaggagccaggactttggcatcagattcatttattcattctttgagcatctactaagtactgggcattcttctagatcctagggatacagaaggcagctcctgtcctagggaatgtcacatcctaatagtggaggcagatggttgtcaaaggacaaacaggctgtgtctaatggtggtcagagtgctctgaagtaaaaccaggcaggtcagaaagtaaagagctggggtgtggctgagctggattgggagggcagggaaagcatctctggagtgatgagatgtacatttgagcagagccctgagtgaaattagggagcaagctgtgtgtctggtacctggaggcagaatattctaggaaataagagtcagagtgtggctgggcatggtggttcacacctgaaatcccagcactttgagaggctgaggcaggcagatcacctgaggtcaggagttcgagaccagcctggccaacatggtgaaatcctgtctctactaaaaatacaacaattagccaggcatggtgacatgcgcctgtaatcgcagctactcaggaggctgaggcaggagaattatttgaacctaggaggtggaggttgcagtgagctgagattgcgccattgcactccagcctgggcaacagagtaagactcagtctcaaaaaaaaaaaaaaaagagtgcaaaggaggtgggagtgcatttagagacaggaaggggacaagtgtgcttagtgggcagtaggttaggaaggtgggcagaggcaagtcgtaagtgaattttatttttgagccattggacacttctgagcaaaagagggaaatgatctgacaggaatgctctcaaaggatccctctggctgcttggtggagacaaactgtaggtagcagaaggggaagtgaggagactgcttggagtggcagggggtttggggacacggggatggggtgaggaaggtgcagtgggccggcaaaggtaatgcagatgagagagggcagcttggaccaggcagtggggacagagaagtaggaacgtgccttagatttattttgtctgctgataatcagagatgagaggggagataaaaagaagcaacaatagttccaaggtttttgatctgaaacttattgaaattcaacctatgccacttgtcgcccaggctggagtgcagtggcataatcttggctcactgcaacctctgcctcctgagttcaagcgattctcctgcctcaacctcctgagtagctagaattacaggcatgcgccaccacgcccggctaatttttgtatttttagtagagacggggtttcaccatgttggtcaagctggtcttgaactcctgaccttgtgatccacccacctcagcctcccaaagtgctaggattacaggcatgagccaccacgcccagcctgttttttccctttttaaaaaacaaaaatacaacaaaacccacacaactttattgagatttacagtcatgcattgcttaacaatggggagaccatctgagaaatgcatcattaggtgatttcatcactgtgtgatcactatgaagtgtatgtgcacaagcttactggtatagcctaccacacaattaggctatatagtatagcctattgctcctaggctacaaagctgtaaagcatgttactgcactgaatactgtaggcaattgtaacacaatggtaagtgtttgtgtggctaaacatttctaaacagaaaaggtacagtaaaaatatgttattataatcttatgggaccaccatggtatatgcagtctgtcattaaccaaaatgtccttatgtggtgtgtggctgtaattcacttaacatacaattcacccatttagtatacaatccaatgcttttttagtgtattcgcagttgtgcaaccatcaccatcattaattttagttgattttttatttttattttttgagatggagtctcactctgtcacccagactggagtgcagtgacatgatctcggctcactgcaacctccgcctcccaggttcaagcgattctctggcctcagcctccagagtagctgggattacaggtgcctgccaccacgcccagctaatttttgtatttttggtagaggcagggtttcaccatgttggccaggctggtctccaactcttgacctcgggtgatccgcctgccttgccctcccaaagtgctggattacaggcgtgagccatagcactcagccactatcattaattttaaaacattttcaggccgggcccagtggctcactcctgtaatcctagcactttggaaggccgaggctggtggatcattcaagtttaggagttcaagaccagcctgaccaacatggtgaaaccctgtctctactaaaaatacaaaaaattagttgggcatggtggtgcacacctgtaatctcagctactcgggaggctgagtcatgagaatcgcttgaacctgggaggcgggggttgcagtgagccaagattgtgccaccatactccagcctgggcaacagaggaggactccatccccaaaacaaaacaaaaaaacattttcatcaccccaagtatgcattaccagtcactccccattttctttgaactctgtggccctaggcaacctctaatccgctgtgtctcgtctgctcctggctctttttgggtcttatctgtattgctatttgctcatctgtaacttcacagggtaactgtgaggtttcaaaaggtgatgtgaaaacatgagagcttgtctagcaggccaaacaaagtggctgtgcccttcactgctgccctgactcctggtttgccatcccagagcaggacagctctgacgatgcgttactgaggcagtgtgagctgtagtgaagagtgtgggtgccagacccagagggctggattgggaattctgaactcacgatttactagctttgcaattctggcaatgtttctagacctccttggggtttcagattcctcaactgtcaaaaatgagtcatagcaagtatagtcatgcatcccttaatgtcgggatactttctgataaatgcattatttaggcaattttgtcattgcgtgagcatgatagagtgtacttacacaaatctagatggtatatacattttatttatatattttttcttctcttttttttttttttttcttgagacagggtctcactctgtcacccaggctcaagtgatcctcccacctcagcctccccagtagctgggaccacaggtgtgcaccaccacacccagctaagtttttaattttttggtagagatgggggtctccctgtgttgcccagactggtcttgagctcctgggctcaagccattctcctatattttttcatgtggaaaacgcaatgtcccagcaccgttactgaatatcactcatctcctctacttgagctgcaatgtcaatatcaagtgccatatgtcagatttccatttttttctttctttctttctttcttttttttttttttttttaaaaaaaagacagggtctcactctgatgcccaggggagagtgcagtagcagaattctgaaactcctgggctcaagcaatcctcccagctcagcctcctgagtagctaggactacaggcttgtgccactacctccgactaatttttgtattttttgtagagatgggggtctcactatgttgcccaggctggtttcaaactcctagcctcaagtgagtctcccaccttggccttttaaagtgccgagattacaggcatgagccactgtgcctggccttatgtttctgtatatgctccactataatcttatgggaccactgtcttatatgtggtccattgactgaagcattattatgcaatgcatgactataattcttaagttgccgtgagtcacacatgtgaagcattgggaacagtgcctggtatgtggcaatgttaatgtgaatgttaattggtaccgtgttatctttattagtcaattaagaagtcctgcagacaggtggtggctcccaacttcatgaccaggagtggacatttctgaatccaggtggttgcaagggcaatagggtgacctgtttttagtgctggctgtgccttttgttggatctgtacctttggaaaagtcacttacccctctaagccttaagttgctcatctgtaaaatggaggttaaaatcatccttacttcaggcctggcacagtggctcaaagcacataatttcaggactttggatggccaaggcgggaggattgcttgaggcactgagttcaagactagcctgggctggccaggcgtggtggctcacgcctgtaatcccagcactttgggaggcgggcggatcacgaggtcaggagatcgagaccatcctggctaacacagtgaaaccccgtctctactaaaaatacaaaaaattagctggcgtggtggcaggcacctgtagtcccagctattcgggaggctgaggcaggagaatggtgtgaacctggaaggcggagcttgcagtgagccgagatcacgccactgcactccagcctgggcgacagagtgagactccgtctcaaaaaaataaaaaataataaaataataataataataaaaagaccagactgggcaacatagcgagacccctgtctctacaaaaaaattgataaattagccgagtgtgatggcgcacacctgtagtcccaagtactcaggagtctgaggcagaagcatctcttgagcccaggagttggaggctgcagtgagttgttatcacaccactgtactccagactgggtgacagaggagagaccctattaaaaaaaaaatcctccttacttcatggagctctgtgaagaattcaatgacctatttaatacctactatatgcccagcactgttttgaacaccacagacaaaaacctctgccctcctggagcttgtgtggagctagtgcagagggacagaaattaataataatcacagtaatcctaataaaataagaaagcatatttgtaaagcacctagtgcctggcatgtggtgagctctctagaagtagtagcagttagggttattatgtgaaagcattttgtaaagctggatagcacagcagagaggtaggtctgaaggtgactgtgccatgagcatgtggccttcattgaagccttacctcatctctgctcaattgaatttcattcagcctccaacgcccccatcttgttgcctgggtgaaatctttgtctcagggtgtagagctttctcctttcctcttttcatccagcatttactgaatgccactttgggctgagcatcctgctgggcgctggggctattgagctgcaaaacccagaaggagcatggtcaggagcctgcaggagggagcccagggcattctgggagcctcgtggccatgcacattagagctagactgtgaaggaacctagctgctgagttttgcttttattctgccaggggagactctgaaggcttctgagctgggtgataaagttcgtggataaactaagagttcacaacattcttgtttaagtactgcatggtaaaagtaaatatttgcattatggttaaatccataatctatatttaagcactgcagtcaaaccaaaaagctacaagatggagatgtaaaggcatgtagaggagcacagacctcagggcaaataacgtctccaatcgaagacagtacactactaaattagcaggaaatgtagccaaatggagcagggaggttttgaagccggataaaccagggttggcacttactatctgttttgagctattgcacgtctgggggagggttaataccctgcagggttgctgaagggattaaagaaatatccatcaagtgcctggcacttaataggcacacaatatgaggcatatattattagatattaatagcaatattaagataagtagtggagcatcatggaaagagttcttgtgtcagccagccctgtgttcaaattctgatacatccagagcaagcttcttaacctttctgagcctttagttgtctcctcacctgcaaaataaacaagtaagacctcctatgtagggttgatgtagggaataaataagaatatagactttgtaggctatgtaatagatgttcagttaagtgctattttaaaaccaaaatgcagtgagctctattgaaattttttgtttgtttgtttatttttgagacagggtcttgccctgtttcacaggctgaagtgtggtggcaccatcttagttcagtgcaacatccacctccctggttcaagtgatccttccacctgggcctcccaagtagccgggagtacaggcgtgcaccaccatgcccggctaattttttgtattttgtgtagaaacatggttttgcaggtggggcgcggtggctcacgcctgtaatcccagcactttgggaggctgaggggagtggatcacaaggtcaggagtttgagaccagcctggccaacagggtgaaactctgtctctactagaaatacaaaaattagccgagcatggtggcgcatgcctgtaatcccagctgcttgggaggctaaggcaggagaattgcttgaacctgggaggcagaggttgcagtgagctgagatcacgtcactgcactccagcctgggtgacagagcaagactgtctcgggaaaaaaaaaagaaacatggttttgccatgttgcctaggctggtactgaatattttgattataaaagttacatcttctaatggtaaaaaattcaaacaatacaaaaacattttaagaaagtaattacaaatcactggaaactccgttacccagagccaatgattatcttttggatacctctttgtgcaaactcttttagtttgaccatcatggtatatgtaaatttattctactcacctgtcctattttcactcaatgatatgttgtggacatatatccagttaatttaaatttatattattgttttaaatcagtaccttgcattatattatattatattgtaccagaatttatttaacactattgatggtcattgaagctacttccagatttttaccattttatacaatgctatattaagcaaccttggacaaagatcactgttcgcttgtttaatttcctcctggaataaatcactgtacatgaattaccaaatcaaaaggttttcccattataattttattaatttttttttttttttttttgagatggagttttgctcttgttgcccaggctggagtgcaatacagtgatcttggctcaccgcaacttccgcctcccgtgttcaagtgattctcctgcctcagcttcccaagtagctgggattacaggcatgcgccaccacacccagctaattttgtacttttagtagagacggggtttctccatgttggtcaggctggtctacctcaggtgatccacccgcctcagcctcccaaagtgctaggatcacaggcgtgagccaccatggccggctaaaatcttttaaattgttattttttataaagagacagggtctcactgtgttgcccaggatggtcttgaactcctgggctcaagcagtcctctcacctcagcctcccaaagtgctgagattacaggcgtgagccaccactgttggcctataattttcttgtgttagccagacttgtgttcaaatcctgatacacccagagcaagtatgattttgttacatattgctaacctgcctcccaaatcaattgtatgaatttgcactcccatcaacagtgcatgagttgtgtctgtttccctccatctttgctgaattctgccaatctttttaacctttgccactctgatctattgaaaaatatctcaatcttgttttaatctgtagttccattcctaatgaggctgaaaatcttttcaagtatttatttccatttgtatttcttcttttgttaatagcatgtttaggcctgttttttttttgttttttgttttttttttttgagacggagtctccctctgtcacccaggctggagtgcaacggcgcaatctcggcttactgcaaactctgtctcccgggttcaagcgattctcctgcctcagcctctcaagtagctgagactacaggcatgtgccaccatgccgggctaatttttgtaattttagtagagacggggtttcaccatgttgtccaggctggtctccaactcctgacctcaagtgatctgcctgcctcagcgtcacaaagtgctgggattacaggcatgagccaccgcgcccggcccccaaggattttttaacttccatattgtgcttaggaaaactgcctaattattaaaatatagttaaaagattaatagttccaggattataaaaatatccatttgtttctttcaatacttttattgtttcttttatcacatgtaaatttttgatctaggtggaatttatttagatttaatgagagaggtggagctctagcttaatttttctccaagtggctagtctgtggctagtcccattctgtttattgacttctttttctccaccagttggaaatgtcacctttatcatacactacaattcctcatacacctggctctgtttctatactctgtttggtttaataggactgtatttctttgttgaaattgctgttttagctgttgtagctatctaatgcattttaatatctggtagaacaagtcccagctcgttaatcttcttcaaagttttcctggcagtagagcaaagtggtaaaattcatggaccttgaggtcagcccgcctgagctttaatcccaggttagccgctaactagctgtgttaccttgaacaagttatttttttgctctctgaacttctgcttcctcatctgtataatgttaacaataacagtatctacctcacagtgtgtttgtgaagatgtgatgagacgatgcatagcaagtcctcaggatggcacctggcacatggtgagtggtcagtaaatgttaggtctttttttttatgaaaatgatgcacctatttttccagttgaattttaggattgttttgacaataaaatctcactgggatcttcattgggatgacatttacttggtgggatgattttgggataattaatatccacgttataggaccttccactctaaggaaagctctgatttccactggtccaagatgttatgctcttcagtagagttttatagttttctttttataagaccagtacatttttgttaactttatttccagatggtgtaattttttttatctattactattattattattattcttttttgagacggagtctcactctgtcacccaggctggagtgcagtgacaccatcttggctcactgcaacttccacctccaaggttcaagcaattctcctgcctcagcctcccaagtagccggaattagaggcatgcgccaccatgcctggctaatttttgtatttttagtagagactggtttcaccatgttggtcaggctggtctcaaactcctgacctcaagtgatcctcccgcctcagcctcccaaagtgctgggtttacaagtgtgagccactgtgcccagcccagatgatgtaatattttaattgctcttgtgaatggaatcctttttttcccaccatttttttttctcccaacccattttggttttttctcccaacctatttcctgtttttgagacatgtctcactctgttgcccagactggagtgcaatggcatgatcagaggtccctgcaatgttgaactcctaggctcaagcagctctcctgccccagcctcccaagtagctgggactacaggtgtgcatcaccatacccagctaatttattttatttttagtatagatgaagtcttgttatattgtgcaggctggtcttgaactcctgggctgaaattatacccttgcctcagcctcccaaaatgctgagattgcaggtgcaaaccactgtgcccagccatctcaccattattattattattttcttctccttctccttcttcctcttcctcttttcttcttgttcttcttttccctattcttcttcctcttcctccttctccttctttttttcttcttattttttttgagacacggtctcactatgttgcccaggctggtcttgaatgcctggcctcaagcaaccctaccaccttggtctcccaaagtgctaggattacaggcatgagccactgtgcctggccctcatcgcaccattttctaatggaattattagtagtacattaaaagttattcatttttgaatgcttattttgcacccaaagtgactataattgttgagtttggaactaatttctcccctacctggtgtcagctttcagacatccccttctgtcaactctaacagcaccccaggcttctatctgctagggcacctactacgttggcttgccatcatttgtaatccatctgtgtaaacacaggaactgtgtctatctaggctgtaagtccccagggctcagcacagggctggcatcccagtaagaggctatcagtgccaatggaagaaggtgccccatgctgtattactgttgttttctgggatagaggagtctttcctctaggatggagagcagagcagtgaagaagcaagcagtcccttacatcatctggctgactgtctaatttggagtagacattgaagtcatcattaatgtcaagagtgaattagatttttcattatatgttgaagaacgcattgagtggtatgggaggatggacggcttaatgaatgtaggaaatcaggcaaaaccttgccaaagaaatgacattcaaggagacatcaagggtgactctgcaaccctgtcttgctttccctgccccaactgcagaccagtcttagcacccagttctgcttgaatgaattcattcagaaaacgttgacaaacacctgtgtcagggcctctgctgttgggtctggggccacagggttgggtaagagccaatatatgagctcagatcatagctctattgagctggttgttacaggaggtggtcaagactttgcttgggatctgcccagcccacctttctggctttgtctcctgctcctgcccctctggactgctggcctgtccccaagtgaacacacttgctctttcacacacagacccatggagaccactccctatcatactcactggcacttctacccagaattcacctgagccaccctctttcctttgggctttcaaggcccagctaaagtattagctcctctgtgaaggctgccctctcggagtttgttgctgcctccttgtccaaaaggacctaagataataggttttaataatgtgtacagttatttatttccatctctaagatcccattagaccaggggccctcggagtcagtgagcttgtctttgtgtttttgctgggacctaatacacaatgggtcactcaggaattgcaattaaaatgggtccagagaaatgtgacctgcaagaataaagggatagggcaacccactctggtccccttccacgctgtggaagctttgttctttcgctcttcacaataaatcttgctgctgctcactcttaaaaaaaaaaaaaaaagaataaagggatagaatgcagaaggaagatgaagatgtaaggacaacttaacttagagcagtggttctgaacccaggcctccaggaaggcagaacggcaaaggggcagaggatgtgagctgtgtagttgaggtagttgggtttgaatcctggctctggcatctattaactccataaactgggacatgtagttgtatttcttggggtttcaagaggggccaggaataccttggaacactatagagaatttcatataaataggtataagtttttctggaaagagagtccattgctttttaacaggcttcacaaaaggtaagcaccactcagaaggggagacactgtctttattagttgtcaattgctgtgaaacgaattacctcaaaatctagtgacttaaaacaatcaacatttcggctgggcacggtggccctcacctgtaatcccagcattttgggaggctgaagttaggtggatcatgaggtcaggagttcaagaccagcctggccaacatggtgaaaccccacctttactaaaaatacaaaaattagctgggcccgatggcaggcacctgtaatcccagctacttgggaggctgaggcaggagaattgcctgaacccgggtggcagaggttgcagtgagctgagatcacaccactgcactccaggctgggcgacagagtgagaatccatctcaaaaaaataaaaaaccaaaaaccaaaaaccaaaaaaaaaaaaaaaaaccaccaccaccacaacaacaaaaaatcaacatatcatgtctcgctgtttctgtgggtctggaatccagcttatgtggatgattctggcttggggtctttcgtgaggttgtaggcaagatgttggccaaggctgaagtcatgtgaaagtttgtctggggctactgtcgtatagacctctccagaaagctgcttgagtgtccttatgacatggtggctagtttcccccagagcatgtgacctggaacaaggcagagctgcaatgttttctctgacctagccccagaagccacttatgctcatttccacagttacagagttcagccctaatcaaagtgggaggggactaaaaaaggatatgaatgtgaggaggtggccatttctaaggctaccacagtgccttagaaagaacttggaatgaggagcttggggtttaaatgttgactccagcaacaaccaattgtgcaatcttgggaaagtgtcttttctttactggcccacttttctcattcacctcgtatgatggttttggaattcaagagttaagtcctgtgaaaagccatttatataagcccccaacttcacatttagttattagaggaagaaaagtcatttagggtagggtgtaagttgatgtttttattataaatcatgggaaacaaagaaataacccattcaccgctctcatcacttgggcacaccacccgctcagcattttgatgttaaaatacattttaaaggttcttttccttctttcacagaggaaataatagaggaaatggcttaaactgaggccagaagcattatggtggatgtgagtaaatctctgcattattaagagagattaaaaattgggatgggtaccttattgaggtcctgaaatctatacttgaaaaccttaaagcatcagagagctgccattttccgtgatttcggtaaaaagcagctcaggttatccttcctttgaggccattctagggggtcccacaaatctttttaagcaaaataaaaatattaataattattaaagttgttttcacattgttgaggtatattgcattaagaatggaatttgtttttccatcataaaagtagcacatactaattctaggttttgaaaatacaaatataaaaaagaaaaaatattacccatagctactaccttaatctaaatgttctatgttttgcggttgaaatgaaaaagaatttttttcaattaaaaagtgtaatatgggccgggcgtggtggctcatgcctataatcccagcactttgggaggctgaggcaggcagatcacttgaagtctggagtttgagaccagcctggccaaacatggagaaaccctgtctctactaaaaatacagaaattaacctggtgttgtggcacatgcctgttatcccaccaactgaggtaggaagattgcttgaacctgggaggcagaggttgctataagccaagatcatgccactgcactccaccctggatgacagagcaagactttatctcaaaaacaaaaggtaatatgtccatggctcacaactgtaatgccagcactttgggaggccgaggcaggaggatcacttgaggttaggagttcgagactatcctgggcaacatagcgagaccctgtctctacaaaaaatttaaaaaaaaaattagctcggggtggtgggatgtgtctgtggccctacctactcctagctactcaggagtctgaggtgggaggatggcttaagcccaggaggtcaagactgcggtgagccatgatcatgctactgcactccagcctgggtgacagagtgagaccttgtctcaaaaaaaaaagacaatcaaaagttgccatagtctgatggttacccagaggtaaccattattgacattttgttgccaggcacagtggctcatgcctgcaatcccagcactttgggaggctgaggtgggagaattacttgagcccaggaggtcaaggctacaataagctgagattgcaccattgcactccagtgtaggcaacagagagaccctgtctcaaacaaacgaaaaagacattttggtaatttaaacacgttttcctccctactgggagactgaacagcaggatttaaacgatggtgaatggaaggtgagctatgagttagggctgcccatcacatgggcagattctgtgacttaatgacaataataaggtcatgaagtctcctatacagggtcttgctctgtcacccaagctggagtgcaatggcgcaaccatggctcactgcagcctcaaactcttgggctcaaatgatcctcctgcctcagcctcctgagtagctgggactataggcacatgctgccacgcccagctgaagtcatgctctctatccatgagcatctttataacttgcatagatatatttgggtgaaatcctgtcttggtctttcccgattctccctgagcaggttccaaacattgtttagggctcaaagggaaattagtcttcagagtttctccagtaaagtaattacggagatcgggtcatttattcaacagattgggtgcctaccatgtgccaagactgtgccaggcactggggatatgatgatgaaaccaaagatgctagcatgaacacaatcactaaaccaaagtcacacaaataaattaaatgtgggagggacaaggagagctatacatgtactgatcatctgctatgctggaagtttatttagcaaatgtaatcttatttaatcatctggacccaagggaggtaatctgacctctctgaatctcagcttcatgtgaaaacggggataatattattgagagagaacatttgttacaggggcaaaccctgttccaaggtttctttcactcaaagtataaacaatgaggcactttttacactttagacactaaaactttttggaggcaaagagggctggtatttagtgagtatctgctatgtgctaggcactttacagagatctcatttaatctcagttccattctttgaatttgctatgtaccctgctgtccaaatgacggcactgagtcagtgagaggtttcataacttgcccaaggccacagaactggatggagaaagactgcagagattcaaacccaggcctgctgacatgcagagccaatgagaatatattatcttgcagtgcagtttatgggatatatgtgtccctttgggaattcctgggtgtctgctggtggcctgttaacttggttcttgaatatgcactttgcttataactgtgcagtttgaaaagtgactcatccccaaactaggcagggttgagtgtctgtcctgtttatcttccacatgccacctgcactaacttctgaagataatctataataaaagcactgtgattaaaaaacagaaaaacacacaccaaaaatgtataggtttgtctgttggtgcttctgacaagaaaataaactcatgaatctcattaactttaaaaaaatcacatctacttaaggtttaatgactaaagccaactttctaacatatctgtaccgttctctgaacatactgttttcacacttaactacgatgttgtcacttgtttctgtctgattctgcaagggcagagaccttgaaatattcaaatctggattcccccatggtttgacccagctgaagtcaggcagtgttcgctgaaagaaataaaggtgtttccataatgcctgtattagctttcttttggggctgtaagaagttaccacagatttagtgtcataaaacaatattcatttctgtttcacgcttcttgtgggcccgacgtctggattccatggctcagctgattctctgcttccagtctcacgaggctgaaatcaaggtgtctatattcctttctagagagttggggagggggtataatctgttcccaagttcattcagcttgtcagaattcagctctgtgaggttgtaggactgaagtccccatttccttgctggctcttggcaggacttcctctgagcttttggaggctgcctggattccctggcttgtggccactttcaaagccagtaacagtgggttgaattcctctcatactttgaatttaattcctctgcctcatctctccaaaacatctcttttgcctcccttttgtgcttttaagggttcatgtgattacactgggctcacccatataatacggaatcatctaattttaagggctttatttccattggcaaaatatcttttgccaaagaatgctggctggtaatcccagcactttgggaggccgagatgggtggatcacctgaggtcaggagttcaagaccagcctggccaacatggagaaacccagtcactactaaagatacaaaaattagctgggcatggtagcgcatgcctgtaatctcagctacttgggaggctgaggcaggaggatcgcatgaacccaggaggcggaggttgcagttagccaagatcacgccactgcactccagcctgggtaacacagcgagactctgtctcaaaaaataaataaataaataaataaaaaagcaacatattcacaggttccagggactaggacttggacagttttgggcaagcggggaagacattattctgtctaccacagtacctgtattaaacatgtaaatttcagttattccctgtaggtcagagggcagtaaagctacttcagaagacatcggaaagaagccaaatgacttgccaaagagtactgtatcagccgtagattgaaaaaaaagaagttaaaaatcctttgtaaaaaatcaaggcaaacagttttttgagggacagtagttcctcctttctctcagggtaaagctagagagatttttaagaggtgtcttattctaacttgcagtcttttccctttgtaggattttgcttaccggactcacaagttttctgtgaccagtattagaagcagaaaacactgaaccccttggcgttagagtttgggctacaccataatggtctcctatcaatactggctctcgctacgtgttaacattagggagtggagagtgtgtttcctcacccagggaaaccgtttaaatgtggccactgatcctgccttcatagtttttaagagctggcatcaatccaactccggacggactctagaaatgtttctggacaacgactgaacctatagttacagaaaacctatgtgctgggcgctctgaatttcatttcaggttctaaaactaaggctcagagaggctaagtatattgcctattgtttctcagctggtaataacagctaccatttattaaacatttgctctatgccaggcgccatatcatacggacctgataatgtcaagatctcccttcacatcctcttccaatctgtcaagaattgtatgttaattttaattccaataatgccatgaaatacaagacaaatgcagatcagaaaactgaggctcagagaggttgagtggacagccagggagtgactcagccaagattccagtctaggtccgctggactccagggcctgaattctctccagggtactgcctctaaaaacgccctcaggtgcattctggtcagtatggccccagagtccaagttctttacacgacccgtcaacatatcaccaagttcctaagaacgctctaggctgctggtgcaggctctgcaaatacacagcggcctgaaagcacaggaagaaatgaagaaccgtctaagtccatcagccgtggaataaccgttttactggtatgagggtctttttgtctcattattatgtggcagtgagtcatttagaggtgaccaaaagggaaagtcctgcctctcgtcccctacgagaagtgtaggtaagaaccgtttaggcgaggagaagcacgaagtgggaactgcgagtcgagctccccatcctcactccccacccgcacccgccaggaggtcctgaagcaaaaagcaccgaaggggttaagggtggccgggggagcccagccaccgccccttcccagcatcgcctcccagaatcccgcaggcccccagccagttctcgcacctcgcgagactccacccagccccttccccgaacagcgacccgtccccgttcctagctgaggtcggtgctaggcggaggacgcgagagggagagcggaagggggccgccgggcacgccgggaagtgtggtccacgcgcttcacgcggccatattcttccggagcgggggaggccagagaggccgttgggactacgactcccaggcgccctttcggtttgtttttgttcaaaaaaaaaaaaccccacactccccctcctcactcttcacacacactcacacacacccacggcagacacgcacgcacccgggcgccgaagggaaagccgcgtctcgccctcccgccccgccgtcggtcctgtctcagtccctcagcagagcgggaaagcggaggccggagccgtgacctctgaccccgtggttatgcggagccgccgcattccttagcgatcgcggggcagccgccgctgccgccgtgggcgactgacgcagcgcgggcgcgtggagccgccgccgcccctcccccaccgccgctctcgcgccagccggtccccgcgtgcccgccccttctccccggccgcacccgagacctcgcgcgccgccgctgccacgcgccccccccaccgccgccgccgccccagccccgcgccaccgccccagcccgcccagcccggaggtcccgcgtggagctgccgccgccgccggggagaaggatgaaggacaaacagaagaagaagaaggagcgcacgtgggccgaggccgcgcgcctggtgaggcggacagccgaggggggctccgtggggcccggggtggggggggctcgccgcgcacccccccactggggggggaggggcaaggccctgcccaccgcgggagggggcggggccatcttcctttaagaacgggacagccccgcaaggcgaggggtggggagcgctccgccgggatgggatgtggcgcctttttccgctcgccctcgcgccccccccgccccgcgcagctaaattccggcggaggggcgagctggcaggccggctcctcccactctgggcagcggggtcccgcgtcccctcccccactatttggcagcgtctgggggtctggggcagcttcgttcattcacccgggggagttgggtttccgggaagggtcggaagctcctccctcgcttcctggtgggtaatggggtggtgcctttgactccgggggtggaaaagcgaccccacattcaaggacgccaatggcatgttgagctttcccaatctaaaccaggtgcgtggagggaagcaagtgcttactcccagcttgaaccctgagcagcggttctctaactttagtgtcctgtgggcgacacctgggaggcggttaggaacgctactcctagggcccttcgtaagacctgctgagcctcagggtctgggatagagcctgggaatctgcgctttcaccagcttcccaggtgattcaaacgcagtggctcacggaccccactttgagaaacgcagactgggctgtttgccttcagaagctggactggaaattggtattttgaggagaactgaatccactttgcaaagaatgtatgttggacaaagacaaagtatctctgttgggagacgttgttcactgaggatttagcaagggagagcgtaacttgagtgtttgaagccgtctcgttcaaccgatgggggttgtgaattttgtgttcagagcgtcagaggacttgcaggtgaaatagcttccttttggattactcccacaaagctcagacactttgagacatattcgggtaattatctgctgataccagtagtaacaggttatactaagatgtcagttcctaagatctgtcacacagcgaggttgtggtgcggatagcataagtgtctcttgacactgtagtttatatgtaatggttgtaattcagttttaatgatgagtgaagctcagacttaattttctctcttattttgaagtgagttttctgcttcaaaggtgttgtgcaaaaaaaaaaaaaatagactgtattgggggggttgacacaaacctgaagtacacctttttctttctcgaagtctgtaaaagttacagatttataaaaactgaaggaatttgggctacagaattttcattggtgcttgctatcctcttccctagtcatttgttgcccagggaacaaaaatagcaattgtttgtatgctgaagttttgtgcttcagtttattttggcctggcatgtgaagtttgaagattttgaggttccgaaatattttttttctgattgagtcaaaattggaagcttgggctagttttcaggatcttgtagaaatttcaggatttctctaacggttctgcacctggaaacaaatataggcctgatggggagtgggagagagctctcgttctcctcctcgacaatgagttttgtgtgttcattgacattctccttggcgttcctgttatgcgggtgtttatgaccctgggcacccaaggaaatttgcttgccagagttttacttgttagaggtaggtgaaagtacttttaagtcttgtgttatttatgtcttgacagaattatgaaatctgtttgtctcaaagttctgttggctcttactagttgactttaggaatttggggtccactgttaagtctctttagattctcgaatttaccgtggtctgaacttcaacatcgaggttgctatttctgttttatcattgactcaacttcaagccaggttatcagggtaagttattcctctttttcttctaaggctcttcattaaaaatagtaatatgaataggaattactttgtttgtttgtttttcgtttgtttgccaccacacccggctaattttttatttttagtaaagatggggtttttccatgctggtcaggctggtctcgaactcgtgaccttaggttatccgcccaccttggcctcccaaagtgctgggattacaggcgtgagccaccgcgcccagcctatgagtaggaattactttgtggtgctgttatacatgtgaaaaaggatttgcgagactttgggagtctgaggtggaataatcacttgaggctaggaattcgagatgagcctgggcaacatagacccggtctctacaacaacagcaacaaaatgagctgggcatggtggtacacacctgtggtcctagctactcaggaggctgaggatagcttaggccgaggagttggaggctgcagtgcccaatgattgattgtaccactgcactccagcctgggtgatagagggagaccctgactctaaaaaaataatgaggctgggcgctgtggctcacgcctgtaatcccagcactttgggacgccgaggtgggtggatcacagggtcaggagttctagaccagcttggccaacaaggtaaaacccagtctctactaaaaatacaaaaattagccgggtgtggtggtgcacgcctgtaatcccagctactgagggggctgagacaggagaatcacttgaacttgggaggtggaggttgcagagagccaaggccatgccactgtccagcctgggtgacagagcaagactcgtctcaaaaaaaaaaaaaaaagaaaaaaagaaaaaggacttgttgagaatgtgatatgcaatttgagtatcttgtgtgtgttttttgttttagaattttccatttctttgaatgggactggatggtaggtgagggggaactttttaagagtcccaggccgggcacggtggctcacgcctgtaatcccagctctttgggaggccgaggcagacggatcacctgaggccagaagttcgagaccagcctggccaacatggtgaaaccccgtctctactaaaaatacaaaaattagccaggcatggtgatggtgcatgcctgtaacctcagctactcgggaggctgaggcaggagaatcacttgaactcgggaggtggaggttgcagtgaacccagatcacaccactgcactccagcggcgacagtgagactctgtctcaaaaacaaaacaaaagaaaaaaccagtcctcttaatgtttaaaaaaagttgctgtaacactgtactggagaatttgtgagagcgtacactggactgagagaaacttgactaggagggaacgtaggacagttgattagaacacctgaacacttctctttgggcaggtgaatttggagtgcttgcaatggcaattgtatgcacttccatgggaacgctttcagattgctcctgaccccactcagattggtgactagagtgttactgggaatccttttaaaaattgtttttgtaggctgtgcgcggtggctcacgcctgtaatcccagcactttgggaggccgaggcgggcggatcacgaggtcaggagatcgagaccatcctggctaacacggtgaaaccccatctctactaaaaatacaaaaaattagccaggcgtggtggcgagtgcctgtagtcccagctactcgggaggctgaggccggagaatggcgtgaacgcgggaggcggagcttgcagtgagccgagatcgagctactgcactccatccagcctgggcgacagagcaagactctgtctcaaaaacaaacaaacaaaacaacaacaacaaaaaaacctttcgtagaggaaagaagattcttaagaatttcagtatagtgtaccccaggagattgatttttgcagatgttaattatgctgttgaaaaatagtctttctttcacacattttgtagtattgtcttttctaggtgtaagaagtagaccttatgtggttgagtggatataaatcctccaacttgttataaacagtttgtttgggagaaatagccaaggggatttccctttaaatcgaggacgctaaatggattctccctggcttcgagaaactctttgttgtatgctttatcttttactttgattcatgactgaccagttcttacatcaaacatttttttcccctttgaagtaagagaagagatacttaaaaaaaaaaatgtagtctagaaagagactaggaatagaacactgctgacttgttcttataccaagagctggaggcataaacagttttaataaaaaagaatactttgtatcttttgatgtaacttccctttagagattctgtttcccctgtcttaaattctcaggctatttctgattgctgtttaaataattggtagttactatttgagtcatgcttcttaaaaaaaaaagatataaaaattcgccagctcagctttcatttaattagtatcaaagaaatgttatctgtggcagtgaacattagtagcttgttccagggtttattgtaggtttgttcaagtcagtactgcccatcttggcacttaggttcttggaatacagaggtggataaggtttgcccctcagggcttatggtcttctggggatgaagaaggtccagacgcaggaacagaattttactacagtcatgatacgtgttatcatagttgtataaatcataaacagatatcccagttgctgcctcttgtctagtcatagtttctcctttcactctcaactgtcctggtttggaagataattgtatgtgttatgaaacaatgggaacattgaaaagagacatttacctctgcctggcagagatcagggaaggcttcctggaggaaggtgctttctgagctgaatcttgaagggtaactaggagttaggccaatcacagagggcataagcaggagctggtgacaacacatagcaggagagaaagagtcagagtgggtgagagggagtgtgtgtatttgcaacgtgtgggaattaggtatatctacaaattattggaacataaagtttgtagagtgtcactgtggatgggtagagaggcagagaccagattgtgagggttccatatgccaggccagtgagcacctactctgtgccagacattgtaggcattacttacattgtctctaatctgtccaacaactcgagaggaagacatcagtatccttcaaaagagaacctaggttcaggttgggttgtaattgccccagtttagaatgtaaaaatttgaatctaactctagatcctgttctttaccggtgggccagtggactttggaagcttcagcttttgcagtatgtgattaaggagctgttgaaggattttatttgctttctattattattattactattttttgagacagggtctcactctgtcaccctggctgaagtgcagtggtgccatcacagctcactgcagcttccacttcctgggctcagatgattctcccacctcagcctcctgtgtagctgggattacgggcatgagccaccatgcccatctagttttttgtatttttttgtagagacagggtttcaccatgtcgcccaggctggttttgaactcctaggctcaagcaatctgcccaccttggcctcccaaagtgctgggattacaggtgtgacccactttacccagccatatatattttttaaattctttaaagagatgaggtttcactgtgttacccaggctggagtgcagtggctatacacaggcacgatcatagtgcactagagcctggagctcctgagcgcagcaagtgaccctcctgcctcagtctcagctgagactataggtgtgcaccaccgtgcctggcctgttgaaggattttagagctgaaagtgatgagggcaggtttgctttgctgggttgacctcagtctataacatgtaagttctaccagagcagggatttggtcttgtttactgtgaatccctagaattgtgtctggcacaaggtacgtgttccatgtgtttgttgaatgaaggatgacaacagagtcagaatggatttgaggaaagcaggactggatggagggataaatattaagaggctgttgtgttgggtcaggtaagagactggttttgggacttggcggacagatgagcgagaaagatgacacctgcgtttctgaattaggtgattatacaggctgtcaatcaaggtagggaatacaggaagaagagtgggtctggagaagaggtgaattagagttgccaattagatgaattaagagtagagctgaattagagtagataatgaaggggtatagtcagtacacaactgaatatttgaatctgaaatttgggggagaagtcagagctagaggtagagattaggtagttatcagaatttaggtagtagctgaaactgagatgataatgttacccatggagaatggaaaatctgaaaagagaagcaaagaataggaccatgggaaataggggttttattttagtaccttctccaaaccttgactttggtgctgaggtcttatgttcttccatagagagtaccttccgcagcagacctatcagacgagatcgggcacattcagggtggtatggctgtagacagcagcatcgtatcagacttctttatgttttgcttgtgacagcagtacttggctatggcagttaaatggactgtaagatgttagcttgatttggagtaccctgagtagctgcacaggtagacaaagtacaaagatattgacagcttttttcttcctttagaagaataacatatctaaaacaactcttaaagcaagagagctgcagttgcacactaagaaaatactgcaatactgccatgacttggttataggtgatgctaacataaatgggatattctgtttctcattgcaccagtcatgcagaatcatagcatcatgtgccagatggcagaacgtactgtggcagttaacaccacaaattaacaacacagtggcagaaagcaccgtttaaaaatatgggtacttggccaggcgtggtggctcacttctataatcccagcactttaggaggctgaggcgggcagatcacctgaggtcaggagttcgagactagctctagtctctactaaaatacaaaaattagtgtgtgtgtgtatatatatatactaatcaaacttccttgggaaagaaaatgtgaatgcatttctgtgtcatacatttcttgtgcagcactatatattctgtggtttagcagtattaacagcatcaagctgaacagtaaccagtgttgctaaggtctcgcatactataccatgtatgctgagaagatatgcatccttagaattgagaattagaacatttcagttaattgcagtaacttttcagtaactagatatatgtgtaatttgatttctgaagtaattttaactgtggaaaaactaagttgtcaccagcggtacctcatagcataactttagcccatgatatatggatggatggatataaatggaaattgcacactgaaattaggacgtttatatttcttcaggtattagaaaactactcggatgctccaatgacaccaaaacagattctgcaggtcatagaggcagaaggactaaaggaaatgaggtttgtattgttcttgttgcttaacatgagggtttcataggatatgtgtctttctgtagttgtagtgatatgagtaagtacacctgtgtatgtatttgtgcttctgtgtctggtagtgagatggaactatccatttcccaaattgtgtgtcgtctcagtggagggtggcagtgggtgaacatccatttgttttcatttagaggtgcagtggctttccccatctccttgttcttccttaaatcttggcatagagcttgttttttgtgtaaggagtcagggcacattttctcttgtgctgttttggaagtttcagacctgatagcctctattgtgcctaacgctacccttttctctatgccgtatcactgaagttctttcttttagaataaaagaacagtggtctcatcaacataaaaaaccactgacttttttccccttactaattgcagtcatatatgatgtgaatttactaaattttgaggtgacctttattttccaaatttatggtgtagttttcctggagaagtaacaagttagaaacatagaatttgcaggcttgaaagccaggactatctttcatctttctttttcctcatcctaacttcaaacttaaaaaaaaaaaaaaaaaaagctgggggtagtggcccatgcctgtaatcccagcactttgggaggccaaggcaggcagatcacttaggtcaggagttcgagaccagcctggccaacatggcaaaaccccgtctctactaacaatacaaagattagccggcatggtgacgcatgcctgtagcctgtagttccagcttgggaggcggaggctggagaatcgcttgaactcaggagacggaggttgcagtgagccgagattgcaccactgcactccagcctggacaacagaataagactgcatctcaaaaaacaaaacaaaacaaaaaacaaagaaagtacttaaatgaggaaagaggagagcactacacagtccttgcctgggactcagagcaaacttcatgtttttgctagtcaaacttagctgctttaattgaccttttagggtcaaaaggccttcactttccagttgtcagttcaaacgttctcaagttgatgttttgtggggagggaagattgagattgtctacatcacatttatttgacttgtacttatccactgtgtagtgttataattgtgctttatttttgtttttatgggctatttcccatcatgctgctgtctgcactgctgttggaccactttgcctatagaaggtaaatgagtccctttgggacatatggaattgagaaccttaacttgtttctgcttcttgttcttagaggaattatgaagcagtcatgatggctcatgatgagtgagcagctctgtaatttgtagacagaggtataatatgtaggagtcacagaagagctgtgccagcatgctgttccccttgtagcagagatgctagcacacccacttgatactccagattttgcatagggtttcttttagagattggttcttggtgaaaaattttttagcatccagtgtgttccaaggcaaaataagtaatagttttttaatggtttttttagactcagaatttatttttaacactgcataaattagggcttctagttctgaaaaatgcaaagaggcttacttaagctatttatatattttttaacatgctggggagagggaagagagggtgcacaggtgactcctagcactaatatgctagtgccaaactcagttaatattaataatggtcatttgttgatatttttggtagcttttctatttaaagattcagtaagtagcatcctttgcactgaattgtcacgttttgtaacctgctgttgtggcagggaccatgaaacaacttagtatgccattgtttcagtttattttttaagcattactgggaactaaatccacttgacttactttttgcatttaggtttaaataattgttcctgggtagatacagaataaaactcaatctccccacttccagcagagaaaaaacaaatgaaatactgttctttttgtgtacttactagaaaatgtttaactggaaaaaaagttctgcttgttttattggcacagcaccattgattctgtgattctttgtcatagtattctgtggcagtttctgagtatgatatgtagattgaaatatagaggctaggaaacttttaatagtaaaattttactaaaaatttattaacttattaaaatataacttgaaaaaattgtgaggtttttctaaatttcttggaaatttgatttatattgtcaaaaagcactgaagaagtgttagttatggatttcgggtatcacataatgtttattccagagttttctgagtgtgatttatgtgaatttcatttggttattcttttactattttcacagtgaaattgtcatgagattttttcttctgtatttcttgcttagcttcttctcatttaagaatgagttggagggattaggtctttaagtaggcagatggattgtataaccctcatccattcttttgtggttttacagtgggacttcccctctcgcatgcctcaatgctatgctacattccaattcaagaggaggagaggggttgttttataaactgcctggccgaatcagccttttcacgctcaaggtaagtgatatgaactctcttttggtgcagtgattcttggacttttaatgtgcataaaaatcacctggtaggtctggaataggggccatgaatttgcatttctcatatgcagtcaggtgacactgatgtttttcttttttttagacatagtctcgctgtgtcacccaggctggagtgcaatggggcgagatctcggctcactgcaatctctgcctcccatgttcaagtgattctcccacctcaacctcccaagtagctgggactacaggcacatgccaccatgctcggctaatttttttattttttttaatagagacggggtttcaccatgttggccaggctggtctcgaaatcctgacctcaggtgatccacctacctcggcctcccaaagtgctgggattacaggcatgagccaccgcacctggccagatgctgttggttctaaatggcactttgaggtgttctaatatgaatcagatattagaaattatttagtcatagcagctcttgtttgtgtgttcatcttttcttgtctatatctttgtagattgtacaaaactgaagcataactatggggataattgcagatgtgcctttttttttttttttttttttttattctgagatggagtctcactctgttgcccaggctggagtgcagtggtgcgatctcagctcattgcaccctccacctcccaggttcaagcaattcttctgcctcagcctcctgagtagctaagagtgcactaccatgcccaggtaatttttgtatttttagtagagacggggtttcaccatgttggccaggctcgtcttgaactcctgaccttgtgatccgtccgccttagcctcccaaagtgctgggattacaggcgtgagccactgcacctggccacagatgtgccttaattaggattttgttgtagtaatgatgtgaaggataaattactggtcagctaatgtaagacctactctatggaaaataactgaaatgtgaacatatttgtggaaattaagtgacagtaattataaagtaagagtacttaaatcaggtagagttcataataaagcttaaatagggccgaaatgaacaggctaattatttttccaccatttgtgatatatatggtaatcatttagaccgggggtctgcaaagtttttctgtaaaggaccagaaaatcaatgtttttttgttttgtggatcatactgtctttgtcttaaccactcaggtctgccattgtagtaggaaagcagccatacccaaatgaatgggcatggctgtgttccaaaaaaaaaaaaaatttatttacaaatgtttgttttacttacgaaaacaggctgcaggccagatttgatttggggctgtactttgtcgacccctgatttagacataagatgacttgtcgacattggagaaactgaaaatttgatgctgaccctttcgttcttccatagtgggttataaattttagcagtcagtacaaactttttcctttaagttttgttttcttgatggactgtattcaaaataaatacctgaacaaataccaactatataacatgaagccataaaacttggtctttatatataaataaagtttatcttggggtcagatgtctgtgctgttttctatatttttttatatccaatagtttggtctttttcctttcagttttgtatgcttttcttgtaatcgagccttggaagagacagagccactgagcccaaaacctagctttgtggtcggctgtggtggctcatgcctgtaatcccagcactttgggaggctaaggcgggaggattgcttaaactcaggagtatgagaccttgtctctattaaaaaaaaaaaaaaaaaaaaaaagccttgcgtggtggtgtgtgtgcttatagtcttagctactcaggaggctgaagcaggagggtagcttggagatggaggctgcagtgagctgtgatcacaccactgctctccagcctgggccacatagcaagaccctgtctcaaaacaaaaacttagctttgtaacctgggagggatttaacccttctttttggtggaatatgcatccctggcattgagtcagtccttaataaatgatagcctttatgatgatctgaggtttatcattcttaattgcctgttaatggcatttttctattaatattatctattttttgagatagggtcttgttctgtcacctgggctggagtgcagtatcatagtcacagctcactgcagccttgacctactaggctcaagtgatcctcccacctcagccttctgagtagctaggacttcaggcgcataccactatgcctggctaattttttgtattttttgtggagaaggagttttgccatgttgcccaggctggtctcgagctcctggggtcaagcgatccactggctttggcctcccaaactgccaggattacagacgtgggccactgcacctggcctattattttttaatttaatattaatttatatttttagaaacagggtctcacactgttgtccacagctggagtgcagtagtataatcatagctcaccgtagccttgaactcctgggctcaagcagtagtcccacctcagcctcccgagtagcgtacaccatcaccccagctaatttttaaattttttcctagagatgaagtcttgctatgttggttaaactggtctcaaactcctggcctcaagtgatcttcccaccacagcttcacaaagcactgggatggattacaggtgtgagcaaccatacctggccctctattatctcatatatagcttattgttacatatgctgtaattatatatagttataattatttaatacatatatgtttattacaaatatgcctgttaatggtatattctgtttttaaaaggaaggataattacttttttctatgagtaccttaagggcaggaactgagttttatttgtgtttgtaatttggctctgggcagaattcttggcatagtacgtgctttatgtgtgaactgaattatatttcttcatcttaattttacaggtgtgagccactgcaccaggccccttcatcttaattttaatatatctttgaataaacaccattgtatgaacctgctgtaagcttgggagtggtctgttagtctacagcttgtgtctgagatgtgctaattgaatatttgctcagtacctcatcttaactgcctttggctttatgttgcttatccttcatagtatcttgttcattggccttttacatccataggcatcacttctctgatattcgttgtgctcttttaatggattaatggtttgcttggttggttcctctagttagactgtaaactccttgagagcagagtctgtattttattaattacccacagtactaggtacatagttgccttcaataaatatatatttaatgaacgaatttagtgaataatggctacatttttgtacttcgttattatttatttattttttttttctgagacagagtcttgctctgtaacccacgctggagtgcagtggtgtgatcttggctcactgcaacctccaccgcccaggctgaagtgattctcctgcctcagcctcccgagtagctaggactacaggcgtgcaccaccatacctggccaatttttgtatttttagtagagatgggattttactatgttggccaggctggtcttgaactcttgacctcgtgatccgtctgcctcggcctcccagagtgctgggattacaggtgtgagccaccgcgcccagccttcattattcttttgacatttgatgataaatactgtttatgattttctttttctttttttttttttggtagagacagtctcgctttgttgcccaggctggtcttgaacttttggactcaagcgatccacccacctcagcctcccaaagtgttgggtttacatgcatgagccacctcgtgtgtccttgttcataattttgatgggctgggcgcagtggctcacgcctgtaatcccagcactttgggaggccgaggtgggtgaatcacttgaggtcaggagttcaagaccagcctggccaacatggcgaaaccccgtctctacgaaaaatacaaaaattagccgggcgtggttgtgcacgcctgtaatcctagctacccaagaggctgaggcaggagaatcactttaacccgggagatggaggttgcagtgagctgagatcgtgccattgcactccagcctgggcaacaagagtgaagctccatctcaagaacagttttgatgaaattgtccctagatttgcatctggcatctagctcatatctcagagccagaatgaaggatgcttacctctgggtttggtaaattttagcttggttaattatgtgtgtgccttaatttttttgacctattataaaagcaatatacgtaaatgcaacagagaaaatgaaagtaatccataaaattctacctgtggccagctgcgatggctcatgcctgtaatcccagcactttgggaggttgcggtgggtggatcacttgaggtcaggagttcgagaccagcctggccaacatggtgaaaccctgtctctactgaaaatgcgaaaattagctgggcatggtggtgggtgcctgtaattccaggtacttggggaggctgaggctggagaattgcttgaacccgggaggcagaggttgcagtgagccaagattgcaccactgcactctagcctgggtgacagagactcttaagaaaaagaaaaaaaaattcagatacctgtaacctaaataattaatatttgaaaaaatttcatcattgcttctttcattcagttaatatattttgaaccacttgccatggtgttatatatagacatgtcttatatatgtgtatatatatgtgtgtatttatttattttttgagacagagtctcgctttgtcatccaggctggagttcagtggtacaatcatggctcactgcacccttgacttcctgggctcaagcaatccttccagcttccctagtagctgggactacaggcgcatgccaccacacccagctaatttttgtagtttttgttgaggtgggaattcactagtcttgaattcctgagctcaagcaatcctcccatcttggcttcccaaagtgctgggattataggcatgagccactgtgctcacccagttttttatttttagatacagggtctcgctctgtggcttaaagctagatggtgcagtggcaccatcatagctcactacaaccttgagcgcctgggcttaaggaatcttcctgtcagcctccccagtagctgggaccacaggcatgcaccactgcacctaattaaaaaaaattttttttatagagatggagggggtctcattttgttcctcaggctagtctcaaactcctggcctcaagcaatcctctgcttcagcctcccgaagtgctgggattacaggtgtgagccacggtgcccggccccttattctttttgaaggctgttttaagaattccagatttccagccatgaatgtgtgattactaactagtctcttgttatatgcctcatcaacaccacacttctcccagaagttgtgcaggcatttagtttattgttactcaggaatggatgagaaaggatatcaaagatctgaaccagctgattaccatcttggtcacttgagaactcaggtctgtccaataaacaccctaatccaaggtggtgttaaatacatatatatatatttttactttacgtttatttattttgaaaaatttcaaacctatagaaaaattgaggcagtaccatagtcttagtccattttccattacttagaatatccaaaagtgagtaatttataaagaaaattaatttatttcttacagctatggaggccaaggtcgaggggacatatctggtcagcgttttgccatgttggtcaggctggtctcgaactcctgacctcaaggcctgccttggcctcccaaagtgctgggattacaggcataagccaccgtgcccagccacctctgagcactttagatagtatgtcttaagaacaaagacatagcccggcgcagtggctcacgcctgtaatcccagcagtttgggaggctgagtcgggcggatcaccttaggtcaggagttcgcggcaaaaccccgttactactaaaaatacaaaaaattagctgggtgtggtggcgtgcacctgtaatcccagctactcgggaggctgaggctggagaatcacttgaacccaggaggcagaggctgcagtgagccgagatggcaccactgcactgtagcctgggtgacagagcaagacttggtctcaaaaaaaaaaaagaaaaaaagaacaaagacattttcctatataaccacaatgccgttatcacactcaagaaacttaacattgatatgattgtgtataatacatagtccatattcaaatttttctctcatttcaaaattattctttgtggcctaaaatcctgtatccaatcatgatatttttgaacaatccagactagttgttgtatagaagtaagtagtttgttttttttgttttgttttgttttgttttttgagacagggcctggctccgttgcccaggctggagtgcagtggcatgatcacggcttactgcaacctctgcctcctgtgctcaagcaatcttgtgcctcagcttcctaaataactggaattagaggtgcgtgacaccacgcctagctaatttttgtatttttaatagagatggggttttgtcatgttgcccaggctggtcttgaactcctggactcgaagcaatcctcccacctcagcctcccaaagtgctgggatttataggtgtgagccaccaggcctggcagttaagtacattttttaaggactaataaaaatgtagaaatcttcgttatttccggaatcctttatgttttactgccagtactaatgtagtaatgccagacagtagtcatgtctactgttccaggttgtccaaaggattcagcagcaaaggatgaaagtggtgggaagttttgcatagtggtcgaccaagggctagtttggtgagtgtcttgcctatgataatggacaggaagacaccagttattttattttatttttattttattttattttattttaattttattttgtgttgtgttgtgttatctttgagatggagtctcactgtatcacccaggctggagtgcagtggcgcaatctcggctcactgtaacctctgcctcccgggttgaagtgatcctcctgcctcagcctcttgagtagctgggattatatgcgtgagccaccacacccgactaattttttgtatttttagtagagacagggttttaccatgttggccaggctggtcttgaactccttacctcaggtgatccacccaccgcagccccccaaagtgttgggattacaggcgtgagccaccacacccagctgacaccagttatttaactcacatttctctgttttccttttaaaggtagtagtgacacctttgaaatcttttggcattttctttgcctgttctcccttatgtgttaaggataagcttacgtgcagaatggcttgttaagttttttctcctccgtacttggaaatctcatctggtgggacattagggtcagaattttgtatattatatattatatatctatcatgatatatataatgtattttatatattatatattatataaatatcatgatagatatataatatataattatatgttatatattttatatttataaaataaaaataaaaaattgcaattattttcaaatagtaaaaccacgtagataaaatataattctggccaggcacgtggctcatgcctgtaatcccagcactttgggaggctaaggtgggtggatcacctgaggtcaggtgatataatatacaacagatataatatgtctattatatattatatataatgttatatagatatctatattatatataatatattaatagatatattaatataatatatattatatattatacagatatctataaatatattatatataatatattatagatatatctatgtatattatatcacctgacgtcaggtgatccacccaccttagcctcgcaaagtgctgggattacaggcgtgagccacgtgcctggccagaattatattttatctacgtggttttactatttgaaaataattgcaattttttattttattttttggttctggaaacatttgtgtggacttacctatgattgtcaggtttactgatttgctggagattttttgggcatgacaaagggtttcttctttgataaaagtttttctgggtaatgtgatggtacaggttgagtatcctttatctgaaatgcttgagacatgaagtgttttggatttgagaatttttagcatcttggaatatttaccacatacatagtaaggtaccttgaggatggggcccaagtctaaacacagaattcatttgtgtttcatatttatcttatatgcatgaaacaaagttgtttgttttcttttttttttgagacggagtctcactctgtcgcccaggctggagtgcaatggcatggtcttggctcactgcaacctccgcctcccaggtccaagcgattctcttacctcagcctcctgcgtagctgggattacagacatgaggcaccatgcccggcaaatttttgtatttttagtagagatggggtttcaccatgttggccaggctggtctcaaacccctgacctgaagtgatctgcctgcctcagcctcccaaagtcctgggattacaggtgtgaaccaccgcacctggccccaaaataaagttttgactctgtgtgtgtgtgtgtgtgtgtgtgtgtgtgttttggagacagagtctcactctgtcgcccaggctggagtgcagtggcatgatcacagctcactgcaaccttagcttcctgggctcaaatgatcctcccactttagcctcccaggtagttgggactacaggtgcgtgccactgtggctgagtaatttgtgtgtgtgtgtgtgtgtgtgtgtgtgtgtgtgtgttttaatagagatggggctttgccatgttgcccagcctggctcttgacctcttgggctcaagccatctgcccaccttgacctcccaaagtgctaggattataggcgtgaaccaccatgcccagcctttgactgtgttttgatggcaacccatcacgtgaggtcaggtgtagaaatttccatttttggcgtcaggttggcactccaaaggtttcagattgtggagctccttggagttttggattagggatgctcagcctgtacatttgacagtttatttacagatgcttgcatcagtgcttggagctagtcctcagtggtgggataggtgaaaattatctctactttgagttcttgatttgaattcttttttcttaagcttttcctaaagtcatgtgtcagtgttgattattgcccggttagaggtaggatttgtattgtttttttacacttggaatttcctgttgtcataagatcactgtgaactcccttgtagtgttgtacattcttaggactttcatgctgaaatactatgcttttataaaatggttgttgtgtctttgctgagtttaaatagggtccaggccaggcatggtggctcatgcttaccctgtctcaaaaaaaaaacaccctcaactaaatatagttaaataggccaggctcggtggctcatgcctgtaatcccagcactttgggaggcggaggcgggcggatcacctgaggtcaggagttcgagaccagcctggctaacacggcgaagccctgtctctattaaaaataaaaaaaaaacctagccaggtgtggtggtgaacgcctgtagtcccagctactcgggaggctgaggcaggagaatcacttgaacccagagacagagtgagactctgtctctcacacacacacacacacagataaataaattgggttcataaatggtgattccagcactcactgtcaggtataacttcagtctttttttttttttttttttttttttttttttttttttttttgagacagagtctccttctgtcacccaggctggagagcagtggtgtagtctcagctcattgcaacctccaccttctaggttcaagcagttcttctgccttagcctcccaggtagctgggattacaggtgcagaccaccacgcccaactaatttatttatttattattattattattattattttttagtagagatggagttttgccatgttggtcaggctgactttgaactcctgacttcatgtgatccacctgccttggcctcccaaagtgctgggattacaggtgtgagccactgtgtccagccaacattattcacttttgttgttacataagatgtcacggccaggcatggtgggtcacgcctgtaatcccagcactttgggaggctgaggtgtgtggatcacctgaggtcaggagtttgagaccagcctggccaacctggtgaaaccccgtctgtactaaaaatatgaaaattagctgggattacaggcgggcacctgtaatcccagctactagggaggctgaggcaggagaatcacttgaacccgggaggcagaggttgcagtgagctgagatcgtgccattgcactccagcctgggtgacagagcaagactgcgtctcaaaaaaagaaaaaaataaaaaagatgtcagttatggctatttgtactttattatacttcatgtgatgatatatggttcagcatcagggtcttttttcagttaagttcagttgaacccttttcctgtttagaatattttttaaaagtataaaaaaacttaataaaagaaatggatggctgggcatggtggctcacccctgtaatcccagcactttggtaggctgaggcgggcagatcacctgaggtcaggagttcaagaccagcctggccaacacagtgaaactccatctctactaaaaatacaaaaattagctgggcgtggtggcggccgcctgtaatcccagccacttgggaggctgaggcaggagaatcccttgaacccgggaggcggagattgcaatgagcctattgcgcaactgcactgtagcctgggcgacaagaaggagactccgtccctcccataaaaaaaagaaatagatgactacatttaaaatatcttccatttaaatccatagtttacaaataaaggaaaaagcagtggaggaagagagtgagataattacttcatttttacaatgttaaataattacaattaaaatttttgtgtacaattccacatttaatagcaatttgcaaatgccttattgccaggtgtggtgtcttacgcctgtaatcccagtactttgggagcccaaggtgggagaattgcttgagccctggaattcgagaccagcctgggcaacatagcgaaacttttgtctctacaagaaataaaattagccaggtgtggtagcctgcatctgtagttggaggtactgggggagctgacgtgagaggattgcttgagcccaggaggttgaggctgcagctgacatcaagccactagactctatcctgggcgactaattgagaccctgtctcaacgaacaaagaaacaaaaaaaacccaaatgatttacttaccattaaataccaagaaaagaatgactggagtaagcttagatttagatacaacaaaatcatggagcttatcatttgaaaggcatttttgacttttcataggtgtgtagcaagcaaagtggtccttttgaaaaatgcaagtcacatcatgtcacttttctgcttggcctttgcctacttctcgaatggttctcctagcacattctaactggtcattattcattgtgtttcagccattctggccttcaacctatttctcaaacaccccaatcttgggtatactttagggcccttgcatttgctagctcatttacctggaaaattctgcggtaacttcttgcacataataggtgctaataaatattggctgcatgcaaccaaaaaagctggcttcggtagtagaagtagtagaagagaacattaccaaagtccttttttttgagacaagatttccctctgttatttaggctgagtgcagtggtgccatcacggctcactgcagccttgacttcttggactcaaatgatcctcccacctcagcctcctgagaagctgggaccacaggtgtgtgtcaccatgcctggccaatttttttatttgtagagaagaggtcttactgtgttgcccagaatggtgtcaaactcctgggctcaagtgatccacctgcctcagcctcccaaaatgctgagattataggtgtgagccactggtccagcctcttaccaaaatctttttttttttttttttttgagacggagtctcgctgtgtcgcccaggctggagtgcagtggcgggatctcggctcactgcaagctccgcctcccgggttcacaccattctcctgcctcagcctcctgagtagctgggactacaggcgcctgctaccacgcccggctaattttttatatttttagtagagacggggtttcaccatgttggccaggatggtctcgatcttttgacctcgtgatccacccacctcggcctcccaaagtgctgggattacaggcatgagctaccgcgcctggccgcctcttatcaaaatcttaaacttgttaattcttgtatctcaccttgcttttatatcagtttttgttatagaatgtgctttctttttaggttatttttcttctgctcagcaagttaactttgaagaatcttttttttcttgccttttttttttttttttgagacagaattttggttttgttgcccaggctggagtgcaatggcgcgatctcagctaacggcaacctccacttcccgggttcaagtgattctcctgccccagcctcccgagtagctgggattacaggcatgaggccaccaggcctggctatttttattttttattttttatttttattttttactagagacagtgtttttccatgttggtcaggctggtcttgaattctcgtcctcaggtgatccacccgccttgacctcccgaagtcctgggattacaggtgtgagccagcgcacccggcctcttgccctctttagagcagttctacataaatctgtggaataatctgctgacgttagaaataaacctttctcagggtgtggccataatctggttcgttgtaattgctgaaggaaaaaactgaacccttaggaacagtttaaacattctaggtggtttttagatatattattcctgttagagttttgaactttgatcatcttgttagaaaaaagaggccaggcactgtgcctcatacctgtaatcccagcattttggaggctgagtcgtcaggaagtcacttgagcccaggagtttggtaccagcctgggcaacatatggagacctcgtctctacaaaaaaaaaaaaaaaaaaacaaaacctgttagccaggcgtggtggctcatgcctgtgttcccagctactcaggaggctgagatggaaggattgcttgagcctgggaagttgcgactgcagtgagctgtgattgtgccactgcactccagcctgggcaacagagtaagaccctgtctcaaaaaaaatgaatttttgcattcatttaaaaatgaatggtagcaacattttagataataacttatgtagtctgtgtgaatctcatcaaatatatgtgatttttaatgcttggaatcctagaattttagtgagggaggagctctcaagttatctaatttactgtcattttacagataaaaactaaacttctgatagatgaaaggatttataccatacatctatatgataattgcatatggctgagttgaggttagaacccaggacccaatctttgatttgatttcttttcattatgccaatttagaataaaattttttctcttggttttctgacctttggccacttcatcttttgaaggatcttgtaagttccttgatatttctcaaaatgtcagttttattctcttcaatgaaagttcttgttaggtgaaagtagcctttcatatccttaaatgtgaacctgttccttaggctggagtttttgtactctccattatattggcatttatagttgttggttttcttttttttttttcttttgagacggagtctgtctctgtcgcccaggctagagtgcagtggcgcgatctcggctcactgcaagctctgcctcccgggttcacgccattctcctgcctcagcctcctgagtagctgggactataggcgcccgccaccatgcccggctaatttttttgtatttttaatagagacggggtttcactgtgtttgccaggatggtctccatctcctgaccttgtgatcctcccgcctcggcctcccacaagtgctgggattacaggcgtgagccactgcacccggccagttgttggttttcttttctgtgccagattgagtgatatatggtggtactaagagcactggaataggagtcaaggactgaggtacagcatagcacctcatgtattacttggtatctccacttgtctctaacactgaagaggtataattggttgtttaaaaactgtgggtgtaaaacgctagtatcccatgaaatggaactgcagaatataagtggatgactctgaaactgcttttgaaacaagcatgagggctcagtttctccatctctcgtgggctccaccatcactgtctgacatcctgatctcctaaggcatctttcctccatcccagagctctgttgaaaatctcttgggctaaaaaccagtacagaccttctgatactcacgttctagcctttttagattgttgtgtgtgaagagtaagtcagctgtggatatttttctttcctattttgtgaggcatttggtatttactggaggctgcctgttttgttgcaaaccttgttccactgtgtactataggaggtctgctcagaaagcctagttagtagagcagtaccatttgctttggtcaattgtagcagcagtctgttttttttttttttttttttttttttgagacagagtcttgctgtgttgctcaggctggagtgcagtggtgtgatctttgctcactgcaacctccgcctcctgggttcaagcgattctcctgccttggcctcccaagtgggattgcaggtgtgtgccaccatgcccggctaattctgtatttttaatagagatggggtttcacccccaggctggtcttaaactcctaacctcaagtgatccacttgcttcggcctcccaaagtgctaggattacaggtgtgagccaccgtgcccggccagcaatctggttttaaaggaggctttgacccctcatttggtaaaaggttccttctttgactaattcccaaaggacatctcgatctgtcttcaaaagaaggggtattccgttgtcagtattcctagctagctctgggagaagagagaacttgattgttttcagggccctggtcagagtctggttttatgcccaagggatgaactgccttttgtccttctacctcctgaagttcagagccctgtgaaaatgaagtggtaaaggtcaagtagcagtagtttgaaaagcaccagcactgggacgattttgtggtagcctagcagagtgggcaggatgcttacttcagaggtgctaaagatgtatttttttttggaacaagaaggttataaatgtttctattaagtttgattttaaagcatgagggttctgggaaaatgagaagattgtacatactctaggcttccttgggactgcatttgaaaaaaaaaaaacttttctttgggtcagccagtatgaaaactgcatttgatctcaatccttcagatcaggcttttggggagagttagttgaagaatttgtttagtctaagaaagttgcttctagcttagctaaatctggaagaaaaaatggaacctgatgtttgagtgctaactgtattccagacagacgttatactccttatattggtccttttgaagcataaatatgtttccaagtcctataataatgaggaaattgcctgtgagagtttaagtaaattgtacaaagtaacacttttggttcagagatttgtttttaatacagagaggacaggttaggaactttgaagcttcagctaaatgagtcagttctcaaatgtttgagaagcatgctcaaggatctggaggaatagcttaattaatttgtacatcatgagaggagtagggagcaaaaatatgtataatttcttctgaatgatgctgtcttttttgatgcagtggtgctaaatgggctttgcttgtatgatacttcttaaatgcattagctaattattttgttttagtcttcttttttgaaatacagatgactctttgagctggttttctttggaaagttatctgtcctgacaattctacttctaaaacttcaactttttttttttagtcttcatttccattgccaccaccctatcctaaattatcccgttatgctggatactgaaatagcttctgcctggtctacttactttcacttcgcccccttacgatccagtgctttgctccttttaatccagtggccagagggatttttttcaaaacataatttgattataacagatctatgtttgatacttatccatggtttcccatggcagttgcagaaaaatccaaaccttgtttggccacactgcccttctttcagtaatttgaattccttaagctttttccagtttcaggatttcccattttgaactctttctcctccactttttcctggccacaggtttcaagagctgacaacttacctcagttcttaagaggatccttcatttatctctaaattggattttcctgtgtccaaaccttacttgttatcacaagtttataattatttgggtgattgtttgatgtgtctctcctgactgggccttaggggcagagaatctgtattattttgttcttgtttatatccctaggagctcttatggtaggtattcaataaatgtttgttgaataaaggcagtggaaaaacacatagaagaggtgctgtggcagcagttctcagtgccaacagttgaattggtttacaatagtaatttttagtgtcaacaaggagatgtgtagtatggaatgtttattagcaagatctttttctcatggaatggaatgtttgaaaacctccaaagtgtaagtttttttttttctcaaaagaaaacagtcatatttggggttacttttttttttgagacagagtcttgttctgttgcccaggctggagtgcagtggcatgatcccggctcactgcaacctccacctcccgagtttaagtaattctcatgccttagccactggaatagctgggattacaggtgtgtgccaccatgcccagctgttttttgtataattattagagatggggtttcgccatgttgaccaggctggtctcaagctcctggcctcaagtgatctgccagccttggcctcccaaagtgctgggattacagatgagagccaccgtgcccggcccattgttacttctgaaatcgaaatcaaatgccatattgattcctgatcttttgtgtatgacctctctctctcttttttttttttttttgctacctctccccgaaagtttttaggatctttttttccacgattatgtaccttgatgtgggtcttttctcgccctttgtgctattaggtctagcaactcatgtgtctcaggtctgggaaatgattttacagtttttccagctggtgcgtaactagctgtttgttctgatactgtcagtatttaactttatgttagaaacatttcataatgcaaatgaaaaatttaagccaggtgcagtggctcatgcactttgtgaggctgaggtgggaggaacacttgaggtcaggagttcaaaaccagcctggccaacatggtgaaaccccttctactaaaaaaacaaaaaaacaaaaattaactgggcatggttgtgcacccccataatcccagttactcaggaggctgaggtacgagaatcactggaactgggagacaggtttcagtgagccgagactgagacagagcaagaccctgtctcaaaatataaataaaatacataaaaaatttaatattatgtatataatatccagcccaggcttttctatttgtcatgccctgtttctttcacatcatagccttactcagatgcctgctgatccttgattgaggtgtgatgcttgagagtcaggctcttaaatactactggcgaattcagtgcattgtggttttgtgacttcacttgtctcttacagaagtggggaagtggtttttacttcgatgcatggttctgaagtagagatgtctatctcctgatgcacactttaaataatccccatgttttccactccatactccatccttgtctggtttaagctcttagcctgtctgcagttcaggggatgaatctgcttggttcttttcagcatctccctctgcaacgcttagatctcatcttcctttgctttgctaactattctctttgcttctccatttgtttctctgtcattgatgacttccaagttatatccccatcctggatattccttttgaacgtcagactcatatattcagttacctcctcagtatctctattcggatatctaatggcatctcaaaattaacatgtgcaaaaccaacctgttccacccttgtgttggctgtataaattagtgggaactccattttttaagttgcttaaatcagaaacctgggagtcatcaattttggagtctgtccctttgctcttgtggcacatgtaatcacgaataaatcctgttggctctatcttcagaatatatctcattttatcactctctctgccaccagagtggtttaagccaccttcatctcttaggttattttagtagcttcctaactggtctccttccttccattcttgccaccttcctcaacaccgaagatatattttatttatttatttatttattttgagacagagtcttgctctgtcaccccagctggaatgcggtggcttgatcttggctcactgcaacctctgtcttccaggcttaagcaattctcctgcctcagcctcccgagtagctggggctgcaggcatgcaccaccatgcctggctaatttttgtattttttagtagagatggagtttcaccatgttggccaggctggtctcgaactcctgacctcaggtcatctgcccgcctcagcctcccaaagtgttgggattacaggcgtcagccaccatgcttggccaaattttttattcctttgggtaaagagatgtattttatttcctttaatttggtaatatagtgagttatgttaatagattctttttttccagtgctcaagcatccttgcattcctaggataaatggtacttcaacatgattttccttttaaatatacattgctggatttaggttataaattattgagaatttttgcatctgtatttacaagtgttacattctaatttcaggccttttccagttttattatcaaaacaagctgtgctgtttttcctctcttgattctcagtagtagtctctttaagatagtgattattcattctttttggtagatcatgcctataagacctgggcatgtatgtttttattgtgggaatatattgtttttactttccttgttatgaaatatataatttattttaaaatatgtatatacagagtttgtgttcctttaaagaataatagctaaaaataaattgcacgcccccacatccaaccatcgtcaaacaaaacatcttttacactctattttatttatttattttcccccacccctctagagtatacacccttttggagcctctgagcattttcctttccctcactgctttagaaacctctattcagatttttcatattaatgattcttttgcttttaacccacatgtgttactgaagtttaagtcctaaataataatttttcctgctttaaaatatatttttatgtcaatgaaatcatactggtggatgtattttctctgatttgctgcttttgcctctcatttctgagcttgatctatgttggtgcatttatagaaatacttcatattttctgctgtgtatcatcttatgctatcaacgtgccatatgatttacctgttcttagcatgtatttgggttgtttctggttcttgctgtaacaaacagctgcatttagtgcttgtgtatgtgtctcctgatgcatgtgtgcattcacttctctggggtgtatatgttgctgggaatgggactgagtattgtgagtgtataatagtatcttgtttttgttttttttccctctcagtttatggcataatttacgtacagtaaaatttaccaccgcccccctgccccgcctttttctttttctgaaacagagtctcgctctgttgtccaggctggagtgcagtggcacaatctcggctcactgcaacctttacttactgggttcaagcgattctcctgcctcagcctcacaagtagttgggattacaggtgcctgccaggctaattttgtagagacagggtttcaccatgttggccaggctggtctcaaactccttacctcaggtgatccacccaccttggcctccccaagtgttgggattagaggtatgagccaccacgcccagccaaattcaccctttttagtgtacaagtatacagctttgtgagagtttgatttctttagttcaaatttgttttaaagttatatttggtattttaacagtgctatttaaatatatgccatatatggcttgaatgcaattatcctagtacagatggtccttgacttatgatgtttttgtgtccctgtaagcccaccttaagttgaaaatattaagttgaaaatgcatttaatatgactaacctgctgtaaatcctaacttagcctaccttaaatgcacttagaacacttaaattagtttacagtgggcaaatcatcaaacacaaagcctatttgtaataaagtgttgaatatcttatataatttattgaatactaaagtgaaaaacaatagttgtatgagtagtcagagtatggcttctcttcaatgcatatcactttcatataccatcgtaaactcaaaaaatcataagtcagggtatgctgtatattttattggtgctaacatacttccattttaaaatacaggaaattcacctttttttgtgtatagtcttgtaagttttgacagatctatatacagatatgtaatccccacccatgattcttttttaatttaaaaaaatatatttttgagacagtctcactgtcacccaggctggaatgcagtggcatgatcgtagctcactgcagcctcaaactcctggccttaagtgctcctcctgcctcagcctcccaaagtgctaggattacaggaatgagccagtgtgccctgccaccaccataattaagatccagaacagtttcatcatcccagaaactttccctgtatccttttgtagtcagcttcttttttcacccccagctcctggtgaccactgatttgttctctgtccttgcagtactgtcttttccagaatgccatataaattgaatcctacattatataacactttgagtctggcgtcttttacttagtgtgaagtatttgagatttatttgtcttgtgatgtgtattagcaatttatttcttttttcttttttttctttttggagacaaggtcttgctctgtcacccaggctgaagtgcagcggcacgatcatagttcactgcaggcttaaactcaagcaatcctcccacttcagcctcctgagtagctgggactgcaggcgcacaccaccatgttcagctaattttttttttttcttggtagagacaggatctcactctgttgcccaggctgatttcaaactcctggcctcaaggaatcctcccacctatgcctctcaaagtgctgggattacaggtgtgaaccattacagttggctagcagtttatttctgtatattgcaggatagtatctcattgtatagatgtaccacattttgcgtattcattcttcagttgatagacatttggactacttcctccttttggctgctgtgagtaatgctgctgtgaataaatatttgtgtgtaagtttctatgtggacatacagtttcattattcttgggtagataaaccttggagtaattgctgggttgggtggtaatttctgtttaacttttaaagaaatagctaagctgttttccaaagtggcttcaccatcttaaattcaagtttttgttttcgttgtatttgaggcagagctttactctcttgcccaggctggagtgcaatggcaagattatattatagctcactgcagcctcgatcttccaggctcaagcgatcctctcacctcagcctcccaggtagctgagagtacaggtgtgtgtcaccatgcctggctaagttttgatttttagtagagataaggtctggctatgtttcccaggctggtcttgaacttctgagctcaagcagtcctcctgccttggcctcccaaagtgctgggattgcaggtgtgagccaccaagcccagccaaggtttttgtgttttagtaaaatttctgctcttcctggcaatacttttttctgaaatttactttgatattgatatagtcactccagttcttttcagtgcttagtttttgcatggtatattttttccatccttttgtgttatactgtctgtttcattatatttgtagttggaccttgattttttttttttccctaattcttttacttgggatgcttggacctaatgtgtgtctagtttttcctaatgtgtcttttacttgggatgcttggaccatgtgtatttaattattgatatggttgggttaagtccaccatctagctatttgttatttatttatttttagagccaaggtcttgctgtgccacccaggctggggtgctagtggcatgatcatggctcactgaagcctctaacttctgggctcaagcagtcatctcactgcagtctcccgagaagctgggattacaggcgtgtgccaccaagcctagctgattttttttttttttttccgagatggagatttgctcttgttgcccactctggagtgcagtggcgcaatcttggctcaccgcagcctctgcctcctgggttcaagcaattctcctgcctcagtctcccgagtagctgagattacaggtgcctgccaccatgcccagctaattctgtatttttagtagagatggggtttcactatgttggccaggctgatcttgaactcttgacctcgtgatctgcccgcctcggcctcccaaagtgttggaaggccgaggcgggcagatcacgcctgtgctgggaggctgaggcgggtagccactgctcccagccctgaaatctttcctcttttctaagatagacatttaatgcacacacacattttgatatgctatgttttaattttcattcagcttaaaatatctaatttttcttttgatttattctttaacttactgattatttagaagtgtgatattatattttgggaataaaaatccagagatcttactgttactgatttttgatttaattccattgtggtaagagaacataccttatatgatttgaatccttttaaattgattgagacttgttttatggatcagaataaggtgtcttgataaaggttccacgggcacttgaaaagaatgtgtattctactgttgttaggtagagcattctattaatgttgattggcttgttgattgataatgttcaagtcttctgtattcttaccgatttcctattctatcagttatagacagagggtgttaaaatctcaattctgttttgcttgttgattgataatgtttaagtcttctgtattcttaccgattttctgttctatcaattatagagagaggtgttaaaatctcaattctgtttgtttttggtttgaaatttacttataaggtacataagcatttatgattgtcgtcatcttgatgaattggtctctgtcattttgaaatgacagaacttactttgtctcataatatagctactcgtgcttttcatttgattagtgtttggcatatatttttatattttaaaaaaacttatcacctgtgtctttatgtttaaagtggttttttttcccaggcatcatgtgtttgggatcttgcttttatccagtttgatagtgtttgccttttaattggagtttgtagactatttatgtttaatgtgattactgatttttttttgagatggagtctcgccctgtcgcccaggctgcagtgcagtggcacgatctcagctcactccaacctccgtttcccgggttcaagtcattctcttgcctcagcctcccaagtagctgggactgcaggcacctgacaccacacccggctaatttttgtatttttagtagagatggggtttcaccatattggccaggctggtctcaaactgctgactttgtgatccgcccacctcagcctcccaaagtgctgggattacaggtgtgagccactgcggctggatgtttactgatttttatagagtttaaacaaccatcttttctatttgtctgatgtggtgtttttttcgtttttgtttttttaagatggactgtcactctgtcgtctaggctggagtgcagtggtgcaatctcaactcactgtaacctttgcctcctgggttcaagcagttttcctgtctcagcctcccaagtagctgggattacaggtgcgtgccaccacacctggctatttttttttttttttttttggtttgagacagagtctcgcactgtcacctgggctggagtgcagtggcgcgatctcggctcactgcaatctccgcctcctgggttcaagcgatactcctgcctcagcctcccaagtagctggtattacaggcgcccatcaccacacccagctaatgttttgtatttttagtagagacagggtttcactatattggccaggctggtctcaaattcctgaccttgtgatctgcccgccttggcctcccaaagtgctgggattacaggcgtgagccaccgtgcctggcctaatttttgtatttttagtagagatgggcttttgccatgttggccaagcaggtctcgaattcctgacctcaagtgatccctgcccttggcctcccaaagtgctggcattacaggagtgagctacgccatgcctggcctggattgaggattttttagtggttcatttttaagtcctttcttggctcattagtactttgttattttagtggctgctttagtgtttattgagttcagcttgtgaaactcagtctttaatattataccacttcacctatattacaagaaccttatagcagtacacttcattttcccttcagactttgtgctatgtttgtcatacacttcacttttacatatgttgtaaactccacaatacattattatttttcatttaagtagtcaatttttttaaaacaatttttttttttttgagacggagtctcactcggttgcccaggctacagtgcagtggtgcaatcttggcttactgcagcctctgcctcctgggttcaagtgattcttatgcctcagcctcctgagtagctgggattacaggtgcgccccatcatgcctggctgatttttgtattattagtagagatggggttttgccacgttggcccagcaggtctcgaactcctgagctccagtgatccgcctgtcttggcctcccaaagtgctgggattacaggcatgagccaccatgcctggcctaaaaagattttaaaagtaagaaaaaatgtcttttactttatatgttttccatttctggtgttctttattgcctatgagcggttccagattctcatctgccagattttcttcagttttttctcgtcagttcagattttctttctgccagaggacttcctttaatgtgtttcttgtagtgtaggtctgctggtgatatctttaagctttggtgtgtttgaaaaagtacttcctcttgtttttagaaagatatattcctttgatacagaattctaggttgacaggtttttttcattgtgtactttaaagatgttgctccactgtctctagcttgcattatttctcctgtaaaatctgttgttattttaatctttgttcttcagcgagcaaatttatcttttttgccttttttggttaatttttaagattttctttttatcactgctttttcagcaatgtgtttattatatactttgttgtagtttgcgtcatatttcttgtgtttgaattctcttgagcttcatggatgaaatttacgtattcagctactatttcttgaaatatttttcttttgtacttccccaccgcatctggagtctgtaattacatgtatatttggctgcttgaagtagtcatacaactcactgatgcactgttatgttttttagtcatttgattctctttgttttgggtagtttctactgatcttcatttcactagtctttatctttcccatgttaaatctgttactcttatccagaattataccttttatccttaaaaattcagtttttttcttttttttgagacggagtctcattctgtcacccaggctgaagtgcagtggcatgatcttggctcgctgcaacctccgcttcccaggttcaagcgattatcctgcctcagcctcccaagtagctgtgattacaggcatgcatcaccatgtctggctagtttttgtatttttagtagagacagagcttcaccatgtttgccaggctggtctcaaacccctgacttcaggtgatccacctgcctcagcctcctagagtgctgggattacaggaatgagcgaccacacctggtttgtttcttaaaaaacatcttatatttctctgcttaacgtgctcaatgttgaacatgtgaaatataataacttttcataatctcttctgattctgtctctatatcatctttgggtctgtttttatgtattctatttttcttgtcattatgggtcagatttcccagttctttgcaatcctaataaattctgtttagatgaaagacattgtgaatttcactttgggttgtggatatttttgtattcatgttggtatttttgagatttgttctggagtgcagatgagttagctggaaactaattcttttgaggcttgctttttagctttgttaggtggggcgtatcctttctgtgtttatttttgtaagggtatacagatatacatgttttcttatttccctctttatttattcttatttaatctgtaacaatctttttccttatattcgtaacattcttagttagggagtaattacctcttccctaactgttgcattagcttcttaattggcactctggttcccagactttttctgtctctaatgcagtgtacagactactgtcagaataattctaaagcacaattctgatattgtcactgtattgcttttcagtgcctacagcagtaggattcacttaaaaaattattcccctaatagtaatataaaaaatttttttgagctcaaactctcattctctctcagtatacatatttgtttatacatgaggtcacatactgcttactaagttagcattttttatgtgttcattttgaaataactctgaacagtggtatccaatcttttggcttccctgggccacattagaagaagaattgtcttgggccacacataaaatacactaatgatagctgaatagctaaaaattaaacattgcaaaaaaaaaaaacaaacaaaaaaaactcactgtggctttttttttttttccctgtatttttctttttcccgagatgaagtcatgctctgttgctcaggctggagtgcagtagtgtgatctcggctcactgcaacctccgcctaccaggttcaagcagttctcctgcctcagcctcccgagtagctgggattaaaggggtaagcccccatgcctggcctttttttttttttttttgtggggtgagcgaccatgcctggctttttttttttttttttttttttttttttttggtagagatggggtttcatcatgttggccagtctggtctcgaactcttgaccttgtaattcacctgccttggcctcctaaggtgttgggattacaggtgtgagccaccactcctggccttttttttttttttttttgagatggagtctcactttgtcacccaggctggagtgcagtggcatgatctcggctcgctgcagccactgcctcccgggttcaagcagttctcctgcctcaccctcccgagtagctgggattacaggtgtgtgccaccactcccagctagttttttgtatttttagtagaggcaggtttcaccatattggccaggctggtgaactcctgacctcaagtgatgcacccacctgggcctcccaaatgctgctggaattgcaggcgtgagccaccatgccaagccaattgtgttttaagaaaagtttatgaattagtattgggcagcatcgaaagtttacaaagtttgcgttgggccgcattgaaagctgtcctgggctgtgtgcgacctgctggccgcaggttggacaaacttgctctgggacataagtttaaaagttataggccaagtgccttggctcacgcctgtaatgtctttgcatttcatcagtttttccactgttatctttctgttacagtacacggtcagaataccacattgcatttagttgtcatgtttccttagatgtgaaacaaatttaccaattgtagtagggtatttacgtatagatcggttcgtttgtagccttatagtatctagttaaaacactgttataaagttattgttatgtatccttttgggtgtggtttctttccttagaaaaatacatttaaaattcattcatgttgttaaatgaatcaataggttgtttctcttttaaaaattgagatgaaattcacataacaaaattaaccattttatttttttaattttatatatattttctgagatggagtctcactctgtagcccaggctggagtgcagtgacgcgatctcggctcactgcaacatctgcctcctgggttcaagcgattctcagccttaaccattttaaagtgcacagttaagtggcatttagtacattcacagtgttgggtaaccatctttatctggttccaaaacatttttttttctttgaaagaaaaccccgtatttattaagcatttttctctctgtccttttcccttcactcgcttctggcaaacaccagtctgctctgtttctgtggatttacctgttctggatattttatacaaatggaatcatagcgtatgtagccttttgtggctggttttgttttttttgtttgtttttttttttgttttttttttttgagacggagtcttgctctgtcgcccaggctggagtgcagtggcgggatctcggctcactgcaagctccacctgccgggttcacgccattctcctgcctcagcctcccaagtagctgggactacaggcgcccgccactacgcccggctcattttttgtatttttagtagagacggggtttcaccgttttagctgggatggtctcgatctcctgacctcgtgatccgcccgcctcggcctcccaaagtgctgggattacaggcgtgagccaccgcgcccggcctggttttgttttagtaagatacttttgctggattaagaataaggttgggccaggggtggtggctcatgcctataatcccagcactttgggaggccgagttggcccagcctggccaacacagtgaaaccccatctttactaaaaatacaaaaattagtcaggcatggtggcgggtaccttgtaatcccagctacttggaaggctgaggcaggaggattgcttgaacccgggaagcggagtttgcagttagccaagatcatgccactgcactctagcctgggcgacaagagcaagactcgtttcaaagaaaaaaaaaagaatacgtagttgacaggtttttttttctttcaatactttaaagatgatataccactgtcttgtcactcaccttgtttctaacaagaaatctgctatctttgttctgtattttgcatgctttttttttccttgctgcttttattattttctctttattactggttttgagcattagattatgatatgccagtatggtttttcttgtgtttattgtgcttgtggttcattgatgttcttggatatgtcggtttatagctttcttcaggtttcggattttttttttttttggccatttttttcaaattattttccatttaatttctcttttctttttagtcaggtactctttatccaaacattaggctgcttgaagttgccccatagcttactgatagtttttgttttaacctgtgttttatttgaaagattctatttctgtgcctttgaatttactttcttttgcagtgtgtaatctgaagttagtcacatttagcatttttaaaaatctcacatattttactctttttttttttttttttttttttttttttttaaagactgagtctcactctgttgcctgggctggggtgcagtggcacaatttcagctcactacaacctccgcctcctggtttcaagcgatcctcccacctcagcctcccgagtagctgggactacaggcacccgccactacgcctggctcatttttgtatttgtagtagagacggggtttcgccatgttggccaggctggtcttgaactcctgacctcaagtgatctgcttgcctcagcctcccaaattgatgggattacaggtgtgagccaccatgcccggccatattttacctttttttatcgttagaattttgatttggtttaaaaaaaaatctttcctgtctctacttaagtttttgaatatatgaaatgcagatataactcttataatgtccttgtgtactcattctaacatctgtgtcatttcagggttggttgcaattgactattctctttagtatacttttttttccttgcctcttgcctggtgatctttgattggatttcagacatagagagttttacctcgttgggtgctggggatatttgtatttctacatatgttctttaactttgttattggatgcagttaagtcacttgaaaaccgttgattcctttaggtcttgtttgtaagatttgttagctgggaacggtgtagtagttggtttatggctaattcttcctcacttctgagacaagattcttcccaaatcttgagggttgtcttgagatttccagtctaatagctacttgagtgggtaagggcagagtactgttcataattcttttgggtgttgttttcctctccttgctgcccatggtcttgggtagtttcatcacactatgggccactcagtactcagtgagtacctctctagatctcctcagccctctactgtgtggtattgtcccatgaattctagctgcctaagtcctgcactctgagctgagctcgctgtcttcaattttgagttctgcagcctccatagggcttctgcttctgcatggtgcccaggaaactctcttcaggcactaagtttggccatcataggactcatatctttgtttctcttcctttggggattactgtctctcattgcctgctgcgcagcatcttgaaagctatagtttcatgttttgttagttattttagtggtttaaggtgagagggtaaatctggtccctgttgtgcttgaaaagtttttttcaacttttcttttagaaataattttaggtttactaaaagctgcagaaataatacagagttctgaggtgtctttcacccacttcccccatgataacattttacataaccatagtatagttattaaaactaggaaattgacattggtataatagtgttaactaaacctcatgccttatttcatattttcacatgaactattttgagctggcatggttaatatacagttctatgaagttttatcacgtgtatagatttcgtgtaattatcactagtcaggttatagaagtattccatcattttaatgaaatgcctttgtactactcctgtgtagtcatcatgtcctccttccagcctccaccaccaatcaaccaaccaactttaatcctggcagctaccagttgtctgaattttatcactttcgctataattttatctttctcagaatgtcataatacagtagtccccgttatctgtggtgatatgttctaagacccccagtggatgcctgaaaccagctatagtactgaaccatatatgtgtgtgtgtgtgtgtgtgtgttttttccccccccccctttttttttttgagacggagtctcactctcgtcacccagactagggtgcagtggtgtgatcttggctcactgcaatctgcacctcacaggttcaagcgattcttctgcctcagcctcctgggtaactgggattacaggttcgtgttaccacgcaggctaattttttgtatttttagttgaggtggggtttcaccatgttggccaggctggtctcgaactcctgacctcaagtgatccacccaccttagcctcccaaagtgctgggattacaggcgtgagccactgcacctggcctactatacatatacgcctatgatgaaatttaatttataaattaggcacagtaagagattaacaataataaaaaattataacaatatactataataaaagttatgtgaatgttgtttctctctcaaaatactgtaatattttcaggctgcagttgaccatgcgtagctgaaagcaagggtaagtggtgactactgtaaatagaatcatataatatgttacctttgagattggcttttcttttttaactcggcaaaatgcctttgaaatcgatccaagtcctatgtattaacactgtttctttttattggtgagtagtattctattcttgggcacactacagtttacccattcttccattgagagcatttctcccccctaaattacaaacagagatggagtcttgctttgtggttggtctccaactcctaggctcaatctatcctcctgcctcagcctcccaaagtgctgggattagaggcatgtgccactgtgcctggccccactgaagaacatttgagttgttcccagtttggggctattacaaataaagctgctgtgaacatttgcatgcagattttagtgtgaaaatatttttatttctctaggatgaatacctacctatgagtagaattgctgggtcgtatgatacatgtatatttaactctgtaagaaacgactacactgttttccagagtggtggtagtttttcattcccactaacaatgtataagaaatccaattgttctgcttttttattagcactttagtattgtcagtatttttccttctgttcattgtaatagatgcatagtagtatctcatgccttaaatttgcatttccgtagtggctaatgatgttgaatatcttttcatctccttaggttccatttgaatattctctttggtgtagtttatgttcaagacttttctattttcaaattggattttttcttactgttgagtgttctagacacaagttatttgttggatacgtgatttgcaaatattttctcctaatcttttaatttgcctaagagtgtgcttcatagagcaaaaggtttgaattcttatgaagtctaatttatctatttttaaattttatagttttttttggtgtcatatctaagcactctttggctaacaaaattttctctttttttctaaaagttgtatgctttacatttaagtctgtgattgcatttgaattaatttttaaattaagcataaggttacatcaatgttcattttcctttttgggggaccaattattccaaaaccatttgcttaaaatgattattctttatttattgaattgctttctcacctctagcaaaagtcagttggccatattttgtgaaaagttctattcctacgcacactgttctggctcattgacctacgcatctgttcctctgtcaataccgtactgtcttgattactgtaatgtagctgtatagtaagtcctaaaatcaggtagtgttattcctccaccttcgtttttctttttcagagttgtttcagctattctggtttctttgtctttacatggaaattttatttatttattatttattttcttgagacagcctcagtgttttgcccgggctggggtgtggtggtatgatcatagttcactgctgcctggaattcctgggctcaagggatcctcctgcctcagccttccgggtagctgggactacagatgtacaccaccactcccagctaatttttactttttttgtagtgctggggtgtcaccctgttgcccatgttggtctcaaacacctgggctcaagtgatcttcctgcctcagcctcccaaagtgctgggattaaaggcatgagccaccacagtcagctgtgtatgaattttagaatcatattatctacaataaagttttggtggagtttcaatagtaaatgcattaaacccattggttagtttggggagaagtgacatcttggccatgttgtcttccagttcatggatatagtatgtttttttacatttatttaggttgtcttttttttttaaaggtacataataattgtacatatttatggggtgcatgtgatattttgatacaggtatgcagtgtataatgatcaaagcaaggtatttaggctatccatcacctcaaatatttatcatttctttatgttgggaatttttcaactcttcccttctaggtattttgaaatataaacaaattatagttaactacagtcaccatactgtgctgttgaaccctggaactaatttcttctatctaactgtatgtttgtacccattgaccaacccctctttatctccctgcccccttcccagctctggtaacgatcattttactctctgcctccacgagatcaactcttttagctcccacataggagtgacaacatgtgatatttatctttctgtgcctcttcctttacttaacaatgtatttaggtcatctttggtatttttatcagcatttcataggttttagcatgcatattttgtacagttttgttagatatatacctagttttttttggtaaactattataaatgaaattgtgcttttaatttttgtttctaattgctgattgctaatatatagacattattgatgttagtgtgttgatctgtattctgtgacctttataaactcacttattagttctacaagtttttctcctagaatctttgggattttctctgttagaccatcatatcatctgttaatagggccggtttaatatattcctttctgatatgtgtaccttttatttccttttcttgcttgattgactagctgggacttgtttgctgtgtcgaatatgagtgcttagtgtggacattcttgccttattcccgctttcagatagaaagcctttagtctttcaccactagtatgatgttagttatagacattttatagatggtctttatcaagttgaggacgttttcttctattcctagtttactgagagtttttatcatgaatgtatttgttgaattttgtcaaagtttctgcattgatataaataattatgctttcttttcacatcttattgttttagtttgcatttccttgatgatgaattccttttcatatgcttactgaccattttatcatcttcctgcgtgaattttctattagttttgcccatttaaaaaaagtttttattttgtagcaattttaagctttcataaagttctaagtacagtacaaagaactttattttttcctgacccattttagagccctgttgttccttactatttttatttattttttgagacagggtctgtcactctgttgtacagactggagtgcagtggtactatcatagctcactccagggcataaacgatcctcctgcctcagcctcctgagtagctgggacaagtgtgtgccaccatgcctggctaatttttttaattttaattttttgaacttctgggctcaagcgatcctcttgcctcagcctcccaaagtgttgggattataggcatgcaccaccgcacctggccctacccttaatactttagtattaatgttttagtatatttgccttaaagttaatgacattctccttgctacctgtccacaatacattcataaaattcagaaaattacactgagtcattattaccatctaatcttcagatttcattaaagtttagctaattgtccatgtaatgtcctttttgtccaaagtatctaggtcagaattatgtgttgcatggagttgtcatatgtctttggtctccttcattctagaacagttctttaatctttctttgattttcgtgaccttgactcctttgaagactacagaccagttattttgtggaatcttttttagtttgaattttctcataattggattcaggttttgcatctttgtcaggtatagcagagaagtgatgctaggttcttagtgtgtcctgtcaggtagctctttatttcagttttttcctattattgattatctctttgatcacttggttaaggtagcatctgccatccttcatcactataaagctcctttttacccccacccctttttttttgagatggggttttgctcctcttgcccaggcttggagtgcaatgtctcaaaaaaaaattaatagtaatatatacagtcatagttagaagccaagatctagtttctaaatgtttgctgctgttggagtgttggtgatcccagttcctttcagtgggaaggggctaaggaatatatgggtatatttacatacatacacatatgttcactcaatctatatttatatctgtctttatctaaatatgttgaaaactatgagcttaccccaataatacaagttctaatccagtcattctagttttttccctttccatatgtataagtcctttttccaacaataataaatctgggctgggcgcagtggcttacacctgtaatcccagcactttgggaggctgaggcgggtggattgcttgaacacaggcgttctagatcagcctgggcaacatgtcaaaaccccatctatatggggaaaaaaaaaaaagttagccaggtgtggtggcacatgcctgtagtcccagctactcaggaggctgaggtgggaggatcacttgagcccaggaggtcaaggctacagcgagccgagattgcaccactgcactccagccagagctactgagtgagaccctgtctcaaatctattccctaatatatttacctaattatttaatcacccactcttcactgttgcagccctttcttcatgcagatgtcctctttactttgcttggactccaacaccctgtgttgggttggctccactctcatcccatggatgagttcactcaagctctgaccagtcacatcagggtgttctcccatatacatgcccttctcaacccgcgtgggcttcaatactctgtcctttgtcattccctgtttgggcatttcactcatcttgatctccaactctcacgtcataccacactcagatacacacagataccttctgtgctccactcaggctctgactctctactcttgtctacctagcctcaggcctccacttttgtatggatgcctaccttgctgtgtaccatgtaatggaagggaagactagtttgggggaagagaagggcagctcttcccatttaaaaagattggtttgtctttttgttttaggtttatagaattgaaatatataggtgggcttggtggctcacgcatgtaatcccagcactttgggaggctgaggcaggtggatcactttggtttaggagtttgagattagcctggtcaacatggtgaaaccccatctctactaaaaatacagaaaaattagctgggtgtggtggagggtacctgtaattccagctactcagaaggctgaggcacaagaattgcttgaacctgggaggtggaggttgcagtgagctgagatcgtgccactgctctccaacctgggcaacagagctagactccgtctcggggggaaaaaaaagaattgaaatatatgtatacacacacatatacacactctggatacatactgtatcccgagtatgtgttttgcaaatattttctcccagtctgtggcctgccttttatttcttttcttttttttgagacagggtcttcctctgtcacccacgctagagtgcggtagcacagtcacaactcaccgcagcctcaacttcctgggctcaaagtgatcctcccacctcagtctcttgagtagctgggactacagacacgtgccaccactcctggcccattatgtctgttttttgtagagatgacgtctcactatgttgcctagggtggtctcaaactcctaggctcaagtgatcatcccacctcagcctcccaaagtgctggtgagccaccatgcctggcctggcctggcctgcctttgcatttttattaaagtgtcttttgattagaagtttttttgttttgaggaagtctgttttatccacattaaaacaatatgtttttaggaacttttgcctatctattaatagtgcacaaaaatattttttggctttatatttttggctcttaggtgtgcgatttatgtcaaattaatttttatttttgagagggagtctagctttgtcacccaggctggagtgcagtggcacaatcttggctcactgcaatctccacctcccaggttcaagcaattctcctacctcagcctcctgagtagctgggattataagcacttgccaccatgcctatttttctatttttagtagagatggggttttaccatgtttgccagcctggtcttgaactcctgacctcaggtgacctgcccgcttcagcctcccaaagttgctgggattacaggcttgagtcaccatgcctggcctcaaattaatttctatgtacggttcgaggtagtcattcaggtttgcgtttttacgtgtttatcttgtttcagctttatttgttgaaatgatgttcccctctttattgaatagctttggtgcctttgtcaaaaatcagttgagtccatacataaggatatgtttttgtactctgttctgttccattaatctatctatttttataccaatattttactctcctgattttagtaagtcatgagattggatagtgttagtagtgtgaatcctctgtgttcttccttcttaaaattgcttggactgcttttggttctttgcatttatttttctttcttttttagagacaaggtcttgctctgtcggcaggctgtagtgcagtgacgcagtcctagcttactgcatcctaaaacttccgggctcaagccatcctcctgcctcaagctcccaaggcgctgggattatgtgtgtgagccaccatgcccagccttctttgcattttcatataaattttagaatcaacttgtcaatttttatcaattaaaaaaattgggattttgattaggattatgttgactttgtagggagaattaacttctcaacagcattttttttcaatccatgaacatggtataatctccagttattatcatctttaatttttcttagtgttttatagtttccaatgaggtcttgcatgccttaacatttttttctcaagtatttttatttttttaattttttaaattaatttatttttttgagatggcgttttgctcttgttgcccaggctggagtgcagtggcggaatcttggctcactgcaacctttgcctcccagtttcaagcgattcacctgcctcagcctccctagtagctgggattacaggcgggcaccaccatacctggctaattttttgtatttttagtagagacagggtttcaccatgttggccaggctgttctcaaactcttgacctcgtgatctacctgccttggccttccaaagtgctgggattataggcgtgagccaccatgcccagcctcagctatttttattttcgatgctattatacatggaatttgttttaaaaatttgtttcccagttttttgccctagcaggtatatagctgatttttcaataacttgtaattttgacataatttcagacacgattgtatttgctttataattctagctacatgttatttttttcatgtactaaagtgcagacataatgccccctaacctctaaatagttattaacaacaagtacattctctttcataaccacattgcaattatcaatgtcagaaaattaatgttgatatggtactgcttgctgtctaatgtgcatactttgagctgggcttggtggtatacacctatagtcttagctactcaggaggctgaggtgggaggatcgcttgagcctaggagttgaaggctgcagtatgccatgatcaaccctgtgaatagccactgtactccagcctgggcaacaatagtgagatccctatctttaaaaaaaaaactgcatattttactgaaattttacctattcttttctaatgccaattataaagcaaaattctggttgaggatctcatccttgatcacatggtacatttgtttgtcaaatctcattttctttaatctgaaaaagttctcacaaacattgtcttttatgacttaattttttttaaagtacagaccatttattttgtattaatagtaagttctccaatatggatttgtcttgatgcttttcattattaaagtaatgtttttgacaggaatacctcagcatgtcctcctcagtacattttatcaggagacacgatacctgtttgtctgatttctgataacgataacttcaaacacttggttaaggtggtgtctgccttatttctctcctataaatagtaccttgtagagagatacagtagtcccctttatctgctggggatgtttcaagaccagtgggtgcctgaaattacagatagtcccaagccctatatatactgtgttttttcctatgcatatgtacttttgataaattttattttattattcctttatttagtttttagaaatacggtcttacaccgttgcccagcctggtcctgaatgaacttctggcctcaagtgatcctcctgcactggtctcccaaagtgttgggactacaggtgtgagccactgtgcccagccccccaagtttaatttctaaattaggcacagtaaaagaataacaacaataactaagaataaaatataacaattgcaacaatgtactataatcaaagttatgtggatgtgatccttctttctctctcaaaatactgtaattttttggactgctgttgaccacaggttatttaaactgtggaaggtgaaacttcgggtagagggcacttactgtactttgagactatatgaatagtctcatgtactttcattcactggttttagcatccactgatgaaggattcctacctaaaacagttagtacgctgaggctgggtgcagtagctcacacctgtaatcccaacactttgggagaccgaggtgggtggatcatttgatgtcaggagtttgagaccagccttgccaacatggtgaaaccctgtctctgctaaaaatacaaaaaaattagctggacatgatggcgcatgcctgtaatctcagctactgggggagggtgaggcaggagaatcgcttgaaccctggagatggaggttgcagtgagctgagatcgtgccactgcactccagcctgggcaacagaacaagactctgtctcaaaaaaaaaaaaaaataaaaaaaataaaaaaaaattagtactctgagagttgttgtcaagtggtgattttttttttttttaagttccaccatttatctgacatctattagttgtggtttttcagtaagggggagagctttaatttattcccccatttgtttattcgttgtgaatttatggattcttttttttttttttttttttttttttgagatggagtctcatgcgctctgtcacccaggctggaatgtagtggcacaatctcggctcactgcaacctctgtctcctgggttcaagtgattcatcttccttagcttcacgagtagctggggttacaggtgcctgccaccatgcccggctaatttttgtctttttagtagagacggtttcaccatgttggccaggcttgtctctccaactcctggcctcaagcgatccacccgcctcagcctcccaaagtgctgggattacaggcataagccactgtgcccggccatggattcctttttttttttttttttttttaaaatatgaagactcgctctgttgcccaggctggagtgcagtagtgcgatcttggctcactgcagcctctgccgcctgggttcaagtgattctcctgcctcagcctcacaagtagctgggattacaggtttgtgccaccacacccagcttttatatttttagtagagatggggtttcaccatgttggccaggctggtctcgaactcctgacctcaagttatccacccgctttggcctcccaaagtgctgagatcataggcatgagccattatgcccagccctacccatggattcttattttattattgagttataatcttactatcatttttaatgtacaaattgtcgctgatttggccagtggaattgcatgtactccagcttttgtgtcctttttatgtgttttcctcattcctgaacacttctttacttacctgctttctgacccagcaagatgttctgggcttagcttatattttcccagccccacttctagaatcatccattttcctggggagctctggtttcttttagcttagaatagtatgcatgtatacatctgtacctgtttctctctttgtctgtctataggtaaatatagtattcatactaataccttgaaattagtctcttactgggggtttcattctaactttacctttctatatgtgcatcttgctactccaacattgaacaacctggcttctattatgtactttgtatctacctacttgctcagttttagtataaacacttagtagttttataattgttaacccattccactgtggaagaacaaatctaactagaactcagtatttgtttatagttcatttaggtttttagcctaaggatatatagtcaaaatacttgaagaattacttgggttagatctgtccttgtgccccttcagtgtggttatgttattcactttaagtatatgtcagtaaaaattttaaatgtatcacaaccacttcctctttttagtgctgtgggaaaacaagcactgttgcattacccttaagaaaagaaataaatttttttttttttttttttggaaacaggtctcactctgtctcccaggctggagggcaatggtgggatcgtagctcacgtcagcctcccaagtagctgggactacaggcatatgcatcctggctggctaatttttttttttttttgcagacatgggggtctcactatgttgcctaggcttatcttgaactcctgggctcaagtgatcctcccgccttgccattccaaagtgttaggattataggcgtgagccactgtccccaggtcaagaaaacaaatggatacttttttttgttgggggatttgatactattaacaaaattatatttgcatctaccttttgaccgattgtttccatttgattattcaaggcagtagtatttgtagttgcagaatattaaaagccatctaaatgctggtggtacatgagggagtggttatactttgatacatcaacatcatggagtatcatgcagctgagaagaaaatgaggaagttttcatgaaacgatagagtaatttccagaatatattgttaagtggaaaattgaagagcaaaatactctctgaggcacgcagattttgttgttgttgttgtttaaggatgaaggataaataaaacagatgtgtatattatcatttgtacaaaaagaaacacaagaagaatacaccggaaacaatgaggttggttaggggactaacaggaatggaatggagagttggagggggatggaaatggaagggatggtggggagcagtgtcacttactctgagtataaccttttatatagttttgatttgtaatcatgttatatttcacataattcaatatgtagataaaataacaaagatgggaaataaaaaacaaaatgggttacaaacaaaagatgaaacccagtgctattaacagctgtacaattcttgatgtgttcaacgtatttcattcttctttctgaatgtttgttcctggagccatcttttttcctgctctccgcatggacagtttgtggtgtaaggtggccagccatcctggtttgcccacgattgaggggtttcccggggtgtaggactttcagtgctaaaactggaaactcccaggcaaactggggcctgttggctactcttttcacgtgcatgtggctgttttcctcggactttccttatatgtaccttgggaattctcttcactttctcctggtatgtcctgcctttcctagatctcacacaaatctcatttattgttactcctttagttgtgtgcgcattctctacacaatacatttatgtagagcagattgacgtagagttgcttctagagaacaggtgcctaggaggtaaattgaggccttacatgtctttattctgtgttccacactagattgttggttgggctcagaattccagaagatgttactcttactactacattcttcagagctgcttttgagaaacatgccattgtgatttctggatatcgtgtgttttttttgaccggaagattttaggatctgtttctctcctgtgttttgagatttcatgataatgctgtggaatgggtctttttcattcattatgctgagtgttttgccttattaaactcggaaactggagtcttctcatttggggaaaatttcttgtattatttctgtcttttggctttcttcctctggaccttctatttgttggatgtgggactctcttaatggagcttctttttcttttttttttttaatcagttctctaggagataatctgttgtttttggcctctcatttttaatttctagcagattgttcatgttctttaatgttgctttatttttttaaaaaaatattctggctgagctgtagtacgtgtctgtggtcccgactactggggaggccaaggtgggagaattgcttacgaccaggagtttgagtccagcctgggcaacatagcaacaccccatatcttattttaaaaaaagcactctatgtttgttttgggcctctttgagaacatttactatgaaattttatttatctttgtttcctttcagttcttcttttgtttattgtgattatctttcatataacaatgtgcttaaatagctggtggttcttgataggtcactcaacagtgagcaaactgatggatcctgtgtttgtgagcagtgtttattggctgtgatagagggtggggacctagatgcttttaggggatcctcctgttatccatttctgaaagtgttttctcctaggctggtcactttttccaggaggagaaatcctttcatctcttgccatctacatgacagtaggctgtggttggggtcatagtactactactatttggggagctttgggagccaaggtggggagggaagctagtggtgtcatgattttctggtgttttttgtttgtttgtttgtttgtttgtttgttttgttttgtttgagatggagtttatctcttgccgcccaggctggagtgcagtggtgccatctcaactcactgcaacctctacctcctgggttcaagcaattctccagcctcagcctccctagtagctgggattacaggtgcccgccatcacccctggctaatttttgtatttttagtatagatggggtttcgccatgttggccaggctggtctcgaactcctgacctcaggtgatcttcctgcctcagcctcccaaagtgctgggattacaggtgtgagccaccatgcccagcctgcgtcatgattttctattgttggtcttatttagagtgtggcatctcactccatgccccatcccttgagctgtgcctctagtcttctgttccagaacttccgtggttcagtttaatcagaatataaatctgttttcctctggagtgggagaagggtgtattgccttactgtttagggacaggaaggagacctgagggggtctgactgttttattcagagtttgaaacagttctcctgttctcagcccctgcctctcaactcttgtctgcagtggttcctggtgcctcccacttccctgcgtgctccgggcttttgaagcactggcttgctttttgtggcttttccctctgcagccataaacttcaactttccttctttgctgagtcagttacttcttaccttcctgctcaacctggtctttcagatttctgttgacatccctcatctactgcctttttccttccccttactctttgtctttatgcatgtacacttttactgttcccttatagtcattctagtgaaccctcaggaagatgcaaagaagtatatgttcattttgccatgtttatccacaacccccaaataccattaaacaaaagaaaagaaaaaatatttaaaaaagaaaacaaaaacaaaaacaaaacaaacccttaataaatggagagcagctatgccatgttgttgattaagaagattctatatcgtaaagatgtcagttcttcccaatttgatttgtagattcaatgcagtacactacaaattttgaaaattgagatataatagttatatgtattttgggggtacaggtgatattttgatacctgtatgcaatacatagacatttttctttgtgttgggaacattaaaattcttcttttctagttattttgaaatatatagtaaattattgtttactataattttcctattctactattgaatattagaacttactccttctatttaactgtaattttataccccttaaccaacttctattttgccatgtttaaatatggaagctcaagcgtttgtacagagaaagtggaaaatgcccttggcttttatgccaaaccccaatccctctgtccccacctgccaccctggcctgttgcccctgttcttcccagtagctacaaccactatcattaatttaacgtgcatcctcctattcatatggaggtatgtggtatgtttgtttatataagtgtattttattttctttaatgtttaatagtgtaccatatcaatatagctacattttatttatccagtcccctgctatgaatatgtgcgtttttcactgttttctaatccctgttataaacactgcagcaacacttatccttaatctccatgtacaaacgtgtgagaatttctctaagggactattcccttaccttttcatattgtatgcttgggtaaaatggaagtgacttggaggctctttctgtgggggttagtgaaaagatttcattacattttctttgcattttgtaattatgatgagaaaaatataaaacttataaatcttttttaaaagttttgagaaacatgctttgttacgatcatgacatcaagttttatgcttaaaaagtctgtaattccttgtgtttaatgatgaactcttcaaattcctgatacagatctatagtcccttattaacaattctgaaatccaaaatattatgagaactgaatttttttccccttgactgatttagtagtaaaacctgacctgtgtaaactcattttgtgtcaaaactctgatgtagattgacaggtctaggttagcttatttgtttcacttggtctttgtctacattttatttttttaaaaattaatgtgtttgattatgggttgctggtggtgctgatacacaatatatgcatatattaacattctaaaattcaagaaattctaaataaaaacacatctagacccaaagatttcaggtaagggattgtggacctgtggtcaccattagctagaaagtttcagctgtgagtggcaacttacaagaatttctttctggttgatagaaactcctttcttattattagtaagaactcagacaatttctttacgttatattccaagagtgtgttcattttttaaataacagctcttccttttctttcgttgacatctataatattgaaattgcttttgataatgcaaatggatttcacattcaagagaacctttttatgttaagtattttgtttaaatggagaagccttttctcaagcatgtatggagattgctttccttgttttaattcttctttaggattttcatgagaaaattaaaacatcattaatggaccattttagccacagttttccaaagttgcattttgactttggatctttaaactttctgtatactttaataggtatgtgtaggtttaaaaaaaattttttttttttgatcagaatcttttgttttaggccaggtgtggtggctcacacctgtagtcctagcacttgaggctgaggagggtggattgcttgcgctcaggagttcaagagcagcctgggcaatatggcaagaaccccatctctacaaaaaataaaaaagttggccgggcgcggtgactcatgtcagtaatcccagcactttgggaggctgaggcaggcgaatcacgaggtcaggagttcgagactagcctggccaacatggggaaaccccgtctctactaaaaatacaaaaaattagctgggcatagtggcaggcgcctgtaaccccagctacttgggaggctgaggcaggagaattgcttgaacccgggaggcagagattgcagtgagctgagatggagccactgtactccagcccagatgacagagcaagactctgtatcaaaaaaataataataataaataaatacaataaataaataaataaattagcctggagtggtggtgcatgcctctagttccagctacttgagaggctgaggtgggaagatcacttaagcctgggaggtcaaggctgcaaatgagctgtgatagcaccgtggcactttagcctgggcccgcacagtgagaccctgtctcaaaaaacaaaaacaaaaaatacgttttagaactatcagttaaattttgtaagccattgtttacctactttaattgggatttaattcatagaccatacagttcaccaatttaaagtatacaattcagtggcttctagtatattcatgaagttatgcaaccatcaccatggtctgattgcataatatttccatcaccccaaaaggaaaccccagtaggtcattcctattctcacctcctcctagtccctagcatcaccagtctactcatttaattactaaaactttctaaaaagcaactcctctcatcttgttcttcaagagtatcttggctctttgtgaccctgtgcttttccatgtaaaattctgtaaaagatcgtgttgagagctttattggaactgcattgaatcgacaaatcaaaatgggaagaattgacatctttttttttttttttttttttttttttttttttttttttttgagacggagtcttgctctgtcacccaggctggaatgcagtggcacaatcttggcctactgtaatctccgcctcccagcttcaagcgattctcctgccttagccttgcgagtagctaggattacaggtgcacgccaccatgtctggctaattattgtatttttggtagagatggggtttcatcatgttggtcaggctggtcttgaactcctgacgtcgtgatctgcccgccttagcctctcaaagtgctgggattacaggcttgagccaccatgcccagccaaattgacatctttatgatataaaatcttcttaatcaagaacatggtatagctctccatttatttagggtttgtttgtttttgtttttttgagacagggtcttgttctgtctctcaggctagagtgcagtggtgcgatcatagctcgctgcaacctgaaactcctgggctcaagcaatgctcccacctcagcctcccgagtagctgagactacaggtgcgcgtcaccatgtgcagctaatttttgaatttttttgtagagcgggggtctccttacgttgctcatgttggtcttgaactcttgggctcaagtgatcctccttcctcagcttcccaaagtgctgggattacaagtgtagccaacatgcctggccttaccaaggttttaagcctttcttgataaagttttatgttttcttcataaaatgatgatatttcttttgtggaatttatccctgggtaacttacgttcgtttttgttataaattatatttttgttataaattatatttttgttttcttttttcttcaaccctggcaaatggatatattttctttttttttttttttgagacagagtttcgctcttgttgcccaggctggagtgcagtggcaccatgtcagctcactgcaacctccgtctcccattcaggcaattctcctgcctcagcctcctgagtggccgggattacaggcgtgcgctaccacgccgggctaatttttgtatttttactagagtcagggtttcaccatgttggccaggttggtcttgaactcctgacctcagatgatccacccacctcggcctcccgaaatgctggcattacaggcatgagcccccacacccggctgatggataaattttctaattgatgatgttaattggtgatgttagtatcacttgatttttccttttttttttttttaatgtgatctcaaatgtcacaatgtggccaaaatcttttactaggtctgagtctcttggatctttaatgtaaataattatgctatctggaaattatgacatgcttttctaatcccttcttgtttctattatgcattgaaaggaattctagtatactgttgaatggttggtgttttcttagtttttcacagccttcaagtcagccttctcctaagagatagtacttattttttgctcaggaaagatataaggaaaggcataactgatattttgcttttttttttacttcagaatctaatcttgggcagtttaaactttatcaatttaaatgttagctctcctttgctcagatttgccacattcgtagtgtcttgtattttttaaaacatctgacctgtgggagaacattttattttggtttacttattacagatggtttattttttttcaacattagcttcttttctagttaccttgccaaactagtatacgttatgcattttagaaacacttatttgtattaatagatgaacgtgagtaaaaagtatacagcaagtcttctttgtactgttttactcttgcaaaagtagaatgaaaagcttttgcagctttcctgtaaaattgaatttctttccatataaaaatgttcaaaatgtatttgtaaaaggaatacgtactcatcatcagtattaaaaaggttcagaataaagaatccctacaactacagtttttaaaagacaactcaaaaaaaaaatgggtgaaagacttgaacagatacttaaagaggaagatatgaatatggccaataagcacattaagaagtgctcatgcagccataaaaaagaatgagttcatgccctttgcagggacgtggatgaagctggaaaccatcatcctcagcaaactaacacaggaacagaaaaccaaacaccccatgttctcactcataaatgggagtgaacagtgagaacccatggacacagggagggaaacatcacacaccggggcctgttggggggtggggggaaaggggagggagagcattaggaaaaatacctaatgcatgcggggcttaaaacctagatgatgggttaataggtgcagcaaaccaccatggcacatgtatgcttatgtaacaaacctgcacattctgcacatgtatcccagaacttaaagtaaaatttaaaaaaaaaaaaacttcaaaaaaaaaaaagtgctcaacatctttagacattaggcaaattaaaatgaaaatcattgaaatctagcactctgaattaaaattaaaaccacaatgaggtaccattatactcccactagaatggctaaaataaaactgccagcttcaaataatggtgaggatttggatcaactggaactctcctcaagtgctgttgggagtataattttttttttaataaagttagctttcatccatcttatgactcggcatttctactcctagatagttattcaggagaaatgaaaacgtctccaaaaatttacaagaatgttcataatagctttattcataatagctagaacctggaaataacccaaatgtccatcaagagagaatatacaaatggttgtatatgagaatattagtctgtaataacaaataatgaactactgatgcatgcaacaatgtagatgaatagcataaacaggctgagtgaaagaagccagatacaaaagaatatatatgtatgagtccatttacatgaagaccaagaacaggcaaaagtacgttatggagatagaagtcagaacaatgattgccttcgtggggtgagaggggtggtttcttttcttttttttttttttttttttgagacggagtctggctctgtcacccaggctggagtgcagtggcgtgatctcggctcactgcaagctccgcctcccgggttcatgccattctcctgcctcagcctcccgagtagctgggactacaggcgaccgccaccactcctggctaatttttttttttttttttgtatttttagtagagacggggtttcaccgtgttagccaggatggtctcgatctcctgacctcgtgatccgcctgccttggccttccaaagtgctgggattacaggtgtgagccaccgcgcccggccgagaggggtggtttcaaatgggggttgattaggaaggggcacaaggaaacttttgggggtgttggaaatgttctatatcttgatatgcatttgttagaactcattaaatggtacacctaagatctgtgcatatcactgtgtttaaattaaactttaatttaaaaaaataggggaaggataggaggaggtatacattgatccaagggcattctcctacgtaagcacaatacagttatcacactcagaaaatttaacattaatgcagcattaccatctagtatgcagttcacattcaaatatcccagtgtcttgaaatttgctgagagtagatcttaattgtcttcacactccccatctcacactctccctctcatggtaactgtgtggtgaaggattggttaatttttttttttttttttttttttaaagacagagtcttgcactgtctcccaggctggagtgcaatggcatgatcttggctcactgcaacctttgccttccaggttcaagtgattcttgtgcctcagcctcccgagtagctgggattacaagcgtgcaccaccatgcccggctaatttttgtatttttagtagagacggggtttcaccatgttggccaggctggtctcgaactcctgaccttgtgatccacccgccttggcctcccaaagtgctgggattgcaggcatgagccaccgtgcccggcctatagaattttttatatgtaggatttagtgaaagatcacccattattaatttttttaaaagcttcatgatgaaaattattcttgtaaaatgttaaaatcttgaatcctagggcatgttttctggcacctgttattttcagtaacccatttcgtttttgtcagacatatagggttaatgtatgaaaagtcaattatgtcaaacttatagagtttatatggaaagattaatgatcttttacaaatgcagaattggctggatgtggctaattgtagaattggcctgtaacctagcacttagggaggctgaggtgggaggatcgcttgagtccaggagtttgatttttttttttaattttttattttttgagacagtctcactctgtcgccctggctgaagtgcaatggcatgatctcagctcactgcaacctccacctcccaggttcaagcgattcttgtgcctcagcttcccaagtagctgggattacaggtgtgtgccaccatgcctagctaattttttgtgtgtgtgtgtatatttagtagggggggtttcatcatgttggcccaggctggtctcgaactcccagcttcaggtggtccccccatctcggcctcccaaagtgctggattacaggtgtgggccacaatacccagcattttttatttatttatttatttatgtatttgagatggagtttcaccctgttgcccaggctggagtgcaatggcatgatcttggctcactgcagcctgcatgtcccgggttcaagcgatcctcctgccacaacctcccgagtagctgggaatacaggcatgtacaccacacccaactaatttttgtatttaagtagagtcagggtttcattatgttggtcaggctggtctcgaactctggacctcaagtgatctgcctggcttggcctcccaaaatgctggaattacaggcttgagccactgcacctggccaagcccaggactttgagaccagcctgggcaacagaccaagaccctgtctgtacaataaaaattatgcagtattagaatagcaaatcttactcttaaaagttttgttttccttgtctttttactgaaaatgcatggctttagaaacttctgggtagtttgaattgcagacaaccaggccctattcctgtttgtttaactaatgagatttgtaaacagtacttggtttccccagactctaggacctagaggaaggaaattttgatttagctcttggtaaagcatttaacacctaatttttctttttcattgttattttcttgatcacagaaaacaatacatgttaatagtagaaaatacccacaattgaaaagaatataaagcacttactaaaactctaccacctaggctaggtacggtggctcacacctgtaatcccagtactttgggaggctgaggtgggtggatcacctgaggtcaggatttcaagaccatcctggccaacatggtgaaaccccatatctactaaaactacaaaaattagctgggcgtggtggcagccacctgtaatcccagctgctcgggaggctgaggcaggaaaatcgcttgaacccaggaggaggaggttgcagtgagccgagatcatgccgctgcactccatcctgggtgacagagcgagactcttgtctcaaaaaacaaacaaaaaaactgccacctagagatggtggtggccaacagcttagtaagaatttctcttgcatttttctatgcaaacacattcaaattttcattttttaaaaaagatgatagaatcatactgtatgaatttaattgcctaattaagcttgtgtatcatcgtttctcttgtcattaaatgctgtacagctttcttttaaatggctatctgtggtagtgttccttgaaggaaataccttaaaattttttgtttttaaacttttataattgtgggaatgtaatacagtgaatgcataggacacaaatgttcagcttaaggaattattataaagtgaacaccctgtaactgccacttagatcacgacatcaaatatggccagcagccaggcgcacctcccctaccccccactgccccttcccagtcacagccccattcttccagctgaaggtaacttctgtcttgactttatgaaagttattttcttgctttcctttagattacctacccgtctttgcattcctaatgctgtagtttagttgagcttattttgaacttttcacaaacggaatcatcaactatgcattattttgtatctggctttcattcactattttgtttttaatattcatctatgtcgttagtagctatagttcattcattttttgttgctgtataatcatccatttattgaatgtactacaatttgattctgcctttggcagccactttgattgtttataatccagatttcaaatgctgcatcatgaacatgtgggttgtgatttgtgtagatgtgcatgtacttctctaaggaatccaagcctaggagggacgttgctgggtcagaggatgtttgtatcttcaactgtaccagataaggccaaattgtattctcaaatgcttggatctgttttcagtgtacttgttctactcctaattaacactacttgatattgtcaaactttaattgtagccattctgatggatgtggtagtatctcattgcggttttaatttgcattattttgcattttccttattgttagtgagattaaatacccttttatatgttttggctacttcagtatcctcttgtgcagtgcctaattcacatcttttatttttcttctgagttgccttttgcccattgatttatatttgttccccctctctccccgcccccaagaaggagtctggctctgtcacccaggctggagtacagtggcacaatcttggctcactaacctctgcctccttcgttcaagtgattctcctgcctcagcctcccaagtagctgggactgcaggtgtgcgccaccacgcccagctaatttttgtatttttagtagagacagggtttcaccatgttgaccaggcttgtcttgaacccctgacctcaagtgatccatccgccttggcctcccaaagtactgggattacaggtgcaagccaccatgcccggcctgatttataaatgtagtctaaatacaagttctttattggttatgtaagttgcagatatctttttcagctctgtaggtaataatgttttttgatgaataggaggtcttaattttaatgtagtttaattgatttgttttctcctttgtaagaatcaatatttttcatgtcctgtgtaaatctcgtattgggataaaagatacatatatattttttaggttttggctaatagttttccgttggcagcatgtgaacctttttatgccatttttactttcatcaagggtgtatgtatgattttctcatactcttgtcagaactggagatttggggtaactttgccagtgtaatagactttcttaattcattaaggagtattttatcttagtttgcccatgagagaagagagattaaatttgttttattataccaagaacatggcagtcaataagcataactaaaaatattatttagcttttgattctgaagaccatgtatggccagtaaggaaaagaggtaaagatgtagaaaactgttttcttttttttctttcttttttttttttttttttttttttgagatggagtcttgctctgtcgccaggctggagtgcagtggcgtaatctcagctcactgcatcctccacctcctgggttcaagtgattcccctgccttagcctcccgagtagctggtactacaggcgcgtgccaccacacctggctaattttttgtattttagtagaaacagggtttcaccgtgttggccaggatggtctcaatctcctgacctcgtgatccacctgcctcagcctcccaaagtgctgggattacaggtgtgagtgagccactgcacctggcctcttttttattaatttaagatacatgattttggctaaaactaatgaaaataaattgatgaaacttcaatgtagtggatcaagagactcatgaaattgatgagttagattgttgtgggcacctgttttaaatttatggtgcctttttagcagaatcatgactttatcaactctttttcacatacttttattcaaagaagacattctcctcctctgccccaacttatcttcttcttgtctccaactgccagtattctcatccacactctttgtagttttgaggtgtgagataactcccaagttcttcttgggaatgggtagagtttaattctgagtctacatgtcgtgagtctattggaagaagcttttcttaggaggtgaaatttgggatggagttctcctctacactctagccctgtagccacaatctttggtttagatctttggcattttttgttggacatctttcatagtgtctacctcttcttcctgcctctaggcttcccgcggttgccagatgaaattccgaaaactcaaatcattcctgtagttaatattcttcagtgactccggaacaatcaaattcttgatccctccacatgggtcttaccatctgccctcgtgccctctctagcttcctgcatattgagttccccacagccctagtttccctgagtttggaatattctttcacatttgctcatcccactatctagaaacttcctacaatctctctactgccaacctgtctgtctagttgctaatttattttaaaacccagcttaagcaacacatccttttggatgtgttacttccctgatcgttattcacctccatgccgtctttcgctcaactcattgaagttaggtgcccctcttctgggctgccacggctctccatgttcacctatgtactgtactttgtattgtaatcagtttaattgacccccctacttatttgagctccttgagagcagggccttgattcctgctccttagcactccaccctccccagaactaacatggtatagcttataggaggcaccctataaatgtttaatgaatgtttgaatgcaaaagtgtatctaactttcttaatgatatatttatgaaaagaacttgctgagaaaaaggtcagttagaaagggttaggaacttgtcagtattctaaatccctctttttcaaaagcatacacatttaggaatgactgccttgctttaagaatttgtagggttttgttcacctgagttgtaccttgctgtcacagaaggatgccctgcagtggtctcgccatccagctacagtggagggagaggagccagaggacacggctgatgtggagagctgtgggtctaatgaagccagcactgtgagtggtgaaaacgatggtaaggaccctttaatggatgggtgagggagccacagcaggcactagggactaacctttattttcctctcttccagtatctcttgatgaaacatcttcgaacgcatcctgttctacagaatctcagagtcgacctctttccaatcccagggacagctacagagcttcctcacaggtaaggaagaggtagagcctagcctgggaggatgaatgatgacaggtataaggcaagatccctccttctcctgtagtgagctgtgaacatgttcagagagtgaagaatagaagtctggtctccagctgttagtagcatttaacagggggccgcaggaaaagtgaacagtaggtttgagcagagtaagttttttctctttctttaccttggctgagtgattttgttcattctttttttttttttttttttttttttttgagatggagtcgcgcctgtcgctcaggctggagtgcagtggcatgatctccgcttactgcaacctctgcctctggggttcaagcaattctcctgcctcagcctcccgagtagctgggattacaggcacgtaccaccgtgcctggctaatatttgtatttttagtagagatagggttttgccatgttggccaggctagtctcgaattcctgacctcaagtggtctgtccacctcagcctcccaaagtgctgggattacaggtgtgagtcaccatgcctagcctgattctgttcattcttgtaatatacacgtgaacattcagggagaagtgtggttagtgcagagtagagagaacaggagattgggagtgagcagtttgaatgataaccctgcacttactagccttgagacttggggaaaattccttacctgtaaaatggggataacagtacatttttgtagcttggaatgatgcttggcacagtgaccagcacgtagctcagtaacattaaccagtgctcttgtcagcattatttgacagatctggttgaagacgaacttcattttacaagagcgtgagtagagatagtgtcgccagggaatgcttttgtggctctgcagttgacttgggctctcttttgttctctcttggaacgcaggcgaacaaacaaaagaaaaagactggggtgatgctgcctcgagttgtcctgactcctctgaaggtaaacggggcccacgtggaatctgcatcaggtatgtgtaaactcatggttgtgatgctttttcctcaggtcctggggacctggcctccctctgtcagcagtttctgacctaatagtgcgatactaggagagctgtcgggccacaggcaagagccctgccaatggatgaggcctgccataggttctagtgctgggctctgctgtgtgccttcctctttgtctcccagggcagtcgtgaggatccaacggaggatttgattatgccagtgctttgtaaaaggtgtagtgctatacaaataaagatggcagtttggcacctgtaaggtgatattttaaagccagaccatgaagtggtggtttctctcagcctaaggctgggagatggaagcatcccagtattgctggcagcatctcagggagagctgggagaaatgagcttgtctgagagccatgggcgcggcttggtgatacttttgaccagtggaatgctgtgccttcagggttctcgggctgccacgccgatggcgagagcggcagcccgtccagcagcagcagcggctctctggccctgggcagcgctgctattcgtggccaggccgaggtcacccaggaccctgccccgctcctgagaggcttccggaagccagccacaggtgagtggcgtggcacttatttctctgcctgtaaagggggcccctgcaggcctagtgagaagatgatgtcttctattccaattcctttaccagtttatttttacttcttgggtggccctctattttttgtttatttttactttgtaatttgcttatttcatttgtagctctctgctaaactgtgagaactcctttcaggcagagatgatgccatactgtttctcgtatgtccctgtaggcctagtctatgcctgccttgtactgcatagtaagtgtttgagtgagtgaaaactgcttctgagcttctcagtgaagaattccaacaccccttttctctcttcggtagcatgttgccacatttgttcccaacatctgtagtctgtatcagacgctcccttttttacaacctagtcagtatgttgagtggaagcatgtgttgaattttggggatgcaaacaaattcagtagtgctattatctatacctcccacccctcaccccaccccacccccattagggttatttgcaatattagtatgctctttgctatttcaggatttaattcttaatgacccacatgctggttttttttgtagatgaaaccattaagaagacaagcttttgcttctgagaattagagtaaacctttgcccatgtgagaactaggtttgctgtcttgctgcttttccagctcatcagcagtgctcaatctaaggtctcacaggtctctagtcctagtgagtttttcagataaaagtaacatttgctgaggcttctgtgagaggtattagcatctcagttggctttgaacagtccttagtacatttctgcatggagatcatccctctccagcccattcacagaaggcttctgcagatttttctatagtatactaactagatttacttttagataattctcatgatttctccagttgagctttgtggagcctgttctccagctttggagggaagctcagaacctgccccttgcctgattttctgtgggaagtgtccttttcaggctgtgacacagcacggtacagagttttgtctgaggagatgcaaccccaagtgttctcctgggtttgatggcaatgacagtaacctggaaagaatatacaggttaggatggactggacaattgagcagattgtgtgcagataactcctgggtagcttgggtgctgtcaccaaagttttcccatcagttggcatttgttttttcttttaaaaagctgaaatctataccttgcttcaaaaatcataggtcaaatgaagcgcaacagaggggaagaaatagattttgagacacctgggtccattcttgtcaacaccaacctccgtgccctgatcaactctcggaccttccatgccttaccatcacacttccagcagcagctcctcttcctcctgcctgaagtagacagacaggtgcacatgggcagcctcccctttgcctctctctgggtgggcttctgttctcttttaagtttatttattaggatttttttcccccttgatccttctaggtggggacggatggcctgttgcgtctcagcagcagtgcactaaataacgagttttttacccatgcggctcagagctggcgggagcgcctggctgatggtatgtagacttggtcatctcggacggcttgcgacgcacctgtcgtgtggtgttgcatgtctcctggtatttaaaacccaagctcgctcttctcaaagggttatttagtataagacaggctttcctcattactaataaatgtggtgggtattaatatgccacacagctctgaagaaataacagggtgtttaggtttagactttcactatattgtatgtatgtactcattcatcatctcctttttatcattaaaactataaacacctattccagtaatcatggcatggtctggaagggtggaggaaagtacactgtggagttgagaagctccaccatgctctgtctttttaggcattgtcacttggagtgattgttagcttctattaatttaattttgtggggaaagtgttgagagggctctaagaacacccctaggtttgatgatttgctagcaggactcagcatatagttatatgtacagggctgcggtttattacagcagaagaatacaaagtaaaatcagcagatggagaggcacatggggtggggtccaggggaaaccatgtgttggcttccaaggtcctctctcagtggtgtcacacaggacacatttaattcccccagtaacaagttatgataacatgtatgaaatgtctactagggaaacctgttaaagactcggtgcccagggtttttatcaagggctgatcatgtaggaagccactgcttggcacatacccagcttccagattcccaaaaggaaggcaggtgttcagcataagccgtattgtttgcataaacaatttaggcacagtgaacaactcatatcagttagggtggttgggaaccctcctgaaatctaagttcccagatgtcagccaagggctgttcttttaagtaggcctttctaagagtaaacaatcaggcctacctactatgttaactttttatctacacaggaaatatgaatggttcttttgtttgttgttttgctttttcgatcaaggagttgcttggtctcactttaaggaagagtgaatttcccttatagtagatgtgttagctctgtccctataagagcatgatgtgagagagcctttagaagagacgtgttgttttaaaactgggagattcagctgtccataagacagacattaatatcccgaatgcacttactagaagaggtttatttctccctaggtgaatttactcatgagatgcaagtcaggatacgacaggaaatggagaaggaaaagaaggtggaacaatggaaagaaaagttctttgaagactactatggacagaagtaaggcagttggagctatgagtcctggtctggggttttgaggggatagaggtagatggtctcaaaatagcatatacttatgtgttggacaagaatgtggagattgcagtgacacttgggtcatttatcttaatgccattcatagtgaagctaacagaagtttttccatggttagattgtgcaccacacagatttattttgttctgagatatctgtgtttctgggtccatattattcatagaaataagagacatgtccactctggcctgaaactgatggctgtgattttgatttgcaggctgggtttgaccaaagaagagtcattgcagcagaacgtgggccaggaggaggctgaaatcaaaagtggcttgtgtgtcccaggagaatcagtgcgtatacagcgtggtccagccacccgacagcgagatgggcattttaagaaacgctctcggccagatctccgaaccagagccagaaggaatctgtacaaaaaacaggagtcagaacaagcaggggttgctaaggatgcaaaatctgtggcctcagatgttcccctctacaaggatggggaggctaagactgacccagcagggctgagcagtccccatctgccaggcacatcctctgcagcacccgacctggagggtcccgaattcccagttgagtctgtggcttctcggatccaggctgagccagacaacttggcacgtgcctctgcatctccagacagaattcctagcctgcctcaggaaactgtggatcaggaacccaaggatcagaagaggaaatcctttgagcaggcggcctctgcatcctttcccgaaaagaagccccggcttgaagatcgtcagtcctttcgtaacacaattgaaagtgttcacaccgaaaagccacagcccactaaagaggagcccaaagtcccgcccatccgggtaggagactgtttgattcctggctgccctggagccaggttttctttgagggtcatgagattatagagcccttaactctggggccctgaagttaattatgtgggaatgtagagctttttatgagaggtttgcttgagacagccttcaagtttagtgagataggttcttttcttcctcacttttttgttcactctgttgaagttatcttgagaggtcaaaatcctttggggttttaaaatctttttaagatagcattagattctttgctatagtgactcacacagtcccaccagaaattaaatttagaagtgtggcatataacagcccttgagcagaatcttctctgaatggtgtgttatggcgccattttactatgatgatttcattgttttaaggaaattatttgattctgtatgccatgacccttaagctactagaatcctagttttgctttacagtccctaggtcagatcacccagtcagttaaaactattttctaattctttttttgcagattcaactttcacgtatcaaaccaccctgggtggttaaaggtcagcccacttaccagatatgcccccggatcatccccaccacggagtcctcctgccggggttggactggcgccaggaccctcgcagacattaaagcccgtgctctgcaggtccgaggggcgagaggtcaccactgccatagagaggcggccaccactgccatcggaggggggggtggcccgggtggaggtggcggcggggccaccgatgagggaggtggcagaggcagcagcagtggtgatggtggtgaggcctgtggccaccctgagcccaggggaggcccgagcacccctggaaagtgtacgtcagatctacagcgaacacaactactgccgccttatcctctaaatggggagcatacccaggccggaactgccatgtccagagctaggagagaggacctgccttctctgagaaaggaggaaagctgcctactacagagggctacagttggactcacagatgggctaggagatgcctcccaactccccgttgctcccactggggaccagccatgccaggccttgcccctactgtcctcccaaacctcagtagctgagagattagtggagcagcctcagttgcatccggatgttagaactgaatgtgagtctggcaccacttcctgggaaagtgatgatgaggagcaaggacccaccgttcctgcagacaatggtcccattccgtctctagtgggagatgatacattagagaaaggaactggccaagctcttgacagtcatcccactatgaaggatcctgtaaatgtgacccccagttccacacctgaatcctcaccgactgattgcctgcagaacagagcatttgatgacgaattagggcttggtggctcatgccctcctatgagggaaagtgatactagacaagaaaacttgaaaaccaaggctctcgtttctaacagttctttgcattggatacccatcccatcgaatgatgaggtagtgaaacagcccaaaccagaatccagagaacacataccatctgttgagccccaggttggagaggagtgggagaaagctgctcccacccctcctgcattgcctggggatttgacagctgaggagggtctagatcctcttgacagccttacttcactctggactgtgccatctcgaggaggcagtgacagcaatggcagttactgtcaacaggtggacattgaaaagctgaaaatcaacggagactctgaagcactgagtcctcacggtgagtccacggatacagcctctgactttgaaggtcacctcacggaggacagcagtgaggctgacactagagaagctgcagtgacaaagggatcttcggtggacaaggatgagaaacccaattggaaccaatctgccccactgtccaaggtgaatggtgacatgcgtctggttacaaggacagatgggatggttgctcctcagagctgggtgtctcgagtatgtgcggtccgccaaaagatcccagattccctactgctggccagtactgagtaccagccaagagccgtgtgcctgtccatgcctgggtcctcagtggaggccactaacccacttgtgatgcagttgctgcagggtagcttgcccctagagaaggttcttccaccagcccacgatgacagcatgtcagaatccccacaagtaccacttacaaaagaccagagccatggctcgctacgcatgggatctttacatggtcttggaaaaaacagtggcatggttgatggaagcagccccagttctttaagggctttgaaggagcctcttctgccagatagctgtgaaacaggcactggtcttgccaggattgaggccacccaggctcctggagcaccccaaaagaattgcaaggcagtcccaagttttgactccctccatccagtgacaaatcccattacatcctctaggaaactggaagaaatggattccaaagagcagttctcttcctttagttgtgaagatcagaaggaagtccgtgctatgtcacaggacagtaattcaaatgctgctccaggaaagagcccaggagatcttactacctcgagaacacctcgtttctcatctccaaatgtgatctcctttggtccagagcagacaggtcgggccctgggtgatcagagcaatgttacaggccaagggaagaagctttttggctctgggaatgtggctgcaacccttcagcgccccaggcctgcggacccgatgcctcttcctgctgagatccctccagtttttcccagtgggaagttgggaccaagcacaaactccatgtctggtggggtacagactccaagggaagactgggctccaaagccacatgcctttgttggcagcgtcaagaatgagaagacttttgtggggggtcctcttaaggcaaatgccgagaacaggaaagctactgggcatagtcccctggaactggtgggtcacttggaagggatgccctttgtcatggacttgcccttctggaaattaccccgagagccagggaaggggctcagtgagcctctggagccttcttctctcccctcccaactcagcatcaagcaggcattttatgggaagctttctaaactccaactgagttccaccagctttaattattcctctagctctcccacctttcccaaaggccttgctggaagtgtggtgcagctgagccacaaagcaaactttggtgcgagccacagtgcatcactttccttgcaaatgttcactgacagcagcacggtggaaagcatctcgctccagtgtgcgtgcagcctgaaagccatgatcatgtgccaaggctgcggtgcgttctgtcacgatgactgtattggaccctcaaagctctgtgtattgtgccttgtggtgagataataaattatggccatgggaaacattgtatatttagtgtgtgtattttgataatgattgatcttaaatctgtatacagaatatcattgatataatactctttaggcaggagcactcttgccttcccccaaaatttacactgctaaagccctctgtcacttggcgacccttctggtcttgctggaggggtttcctgggtataacccattgggctgcccaaggccagccagcctgagctctcctgcaagacagagcctgatgtggcacggagtggggttgcggggggtggggggactgcctgactcccagagggacttgaaactgaagcaagaaggttgcattctccaccaagggagttaacctacctgaactaagtagaaatgccagtcttccactaccccctccctgccatcttttcttctgctactttggggagttgatggccaggaaagaagccagcacagggttaaagtaactcctggcattgcccaccagggggctggtgcacctgctgacctcagggtcacagttgagtcatttgccagttgacggagcaagtttgaccttggttctgttgctgaagcaaatttggaacttttctgtctcagtgtgatccactaacccacaggatcatttggaaccttgaatagctctgcttggacaatggggttggggaatagggttgtctttcctatgaaaatgccatctgtagaccttgtgagtcagccgtccagatgtttgcaggtgaattcctctgcttgacatcctccctgtcactttggaccctatgggagtgggcatctccacgcacctgtgtatgtgaaagtcattttacatttcaaagcagtgtgtgtttcttatttttatatttttaactctttattcttggatgtataaagtgaactttttggcttctgtaagtatgctctatgcacctctaatgttttatcatgtatttatatgttgtacacagtactggctgattctgtaaatggatgtattgtacagagaacatgaacgtctcttcctaattttacatcttcagcatcattgcattaaagtggtgtaatctccttctctacatctgttgtcagagccactgagtgctgtgctgctcgacgtgagggtgaaatgattgacttgtgacctgccaggttgcccgatgccctgttgggtcaccggctggacctgctgcagcctgcagagccacagtcagcctgcccacatgccaccgagcaaacgcatcttgcttttcacatctctcctcctacagccttaatggctgcttgctgccatatgtgacaaatcaccaccaccagtgttaagtgcttctggattcatgggtgagttccctgggcagcccccaggaaggccttccagatctggctccagggtcaccacctgtcacagcaatacctgggaccatgctctcctgggactgtgaggctccttttgacgtacttttgacatcaggcaggtttgggaagaaacaaagccatgcctgctcctgcctctctcccaacatgtttccagcaagtagatgcccctgtgtgtgttttcccttgccttgtttcctgccttatatcttgtatttcgacttattacagagttgagggttcttgcttaatttagatcaagtataaaatttgtatgacttcaagtctcattttatctgaaaggtttttttctcatttaatctgatgtggcattttcgtcatctgaagcatgagtgacaagttgggaatgatgtggtgatttagaatgcagtattggccaagtccaagttgtcaacttaagcgtctgtttaccaaagaccgggaacaggggcccaaacatgtccagtcctcttcttccctctgctggaacctttggggacactcaagggtacagtttgacactgatctggtccatgaggctgcccagagaaagcactgcttctgtatgtctcttgtggtattggaacaataaacccgtacaacctgcagttgtggtctcagtcatctgtggctgcctcgctggtgtgggaaggtcagctggagtgctgagctggaagggaaggagtagacgccagctctcctcaccttggctctggagctactcttcttatacttggagctcttcttttgggaggttagtccaaaaggaatgacttggcagcttcactggtctttagccattcatgacttggcggacttcaccacatagactgcagtcagcgttctactgagagcaatgagaatgtttccccttgggagtgcgagtcacaaactgtgacatccctctgcagcaactcatccaaacagcttcactgaggttgaggttgccaagtggcttcctaatggttagtggtcttctgtgggagggtgactagctctaaccttggaaaaccttaaccacaagcacctctttctgtagcctctggtggcagtgagaggaaggtgctggcccagggtggggtgtctgatgctagttgcgtgagcctgagtagacgacgtgcttcagggattgacttcttgagaagtcctcagacgtctctagagtacgtaaatacattgactttgtgcttatcagaaataattttattagtatataaataagccaaaacagcaaaatgatgggagtttaaacatatattcattaattttttcctgtgaattggaggaaaaactttgtggtgggatatcctttggggagttcaagctgccattttgtattgctgccgtttgatcgacatgcagttttgagaattgatggttcggaggccctgtagtgactgagcaactgcctgctgttggtgatatgtccttgtgtcacagaatccatttgcccacttatgtctgcaggagctcagaatgcattacggtcccagatcgggaccttccaatgcctgttgcctctcctcagggaggcagaatggtgtagtgagttcctagagtatagcctctgcgacgtgccagctctgtgttcttgggccatgttatttaaccaggctgccaactctcatatatgaatgggtgtaatagttcttacttcatgaggttgttagtgcctgccacctaggacataatgactattagttcacagcaggccaaggcaataattgttaggtgaacttatagtagaaatctatacagctactgccagctacttcactcttgctccagaaaggagctgtcaggatgtaggccttgtgcccactgcgctgaggggtgatgcaggctgtgaagtcactttggaccctggcttttggtctcaggccacagacctgaccaaaggttgagtgtagtcctgagtttagactgaatatttggtcaggaaggcttattttgctcatggtccaaaggacaagggaaataatgtttcagaatataggaagaatggtactggcctggcaaggtgtcatttatttgctatccagcctgctgtaagactgtgttagagtgtgtgtgggtatgtgtgcatgctaaatagagctgcctgcatccatcaggggtcttgatggccaaagcatctgcctgccctgtctccctgagaggaggggacccaggctgtgttgccctcgtgtgggtgttgtttgaagccatagaagtggcaggatgtggaactttggagattgctccaaaattggacaacacccctatgcttcctcttgtctctggtcaatttgaaagcctagaatgaacatctctaccgtaagccatagacgaacgccctgtgagaacaacagttgtcagtgctgtgttacctgatatgggtgggtcttaacctttttttgggaactctccccccatggaatgcacatacaaagttttttggggtttttttgcagactctcactctcttcaggctggagtgcagtggcgtgatcatagctcactgtagcctcgaactcctgagctccagtggtccttccacctcatcctcccaagtagctcaggctacaggcacgtgccaccatgcccagctaatattaaaattttttgtagagactgttgcccagactagtcttgaactccaggcctcaagcgatcttcccgatcttcccgccagcacacctggcctcacaaagttttgcatactgtgtcaggatttaccagctccttaggcagctggggccctttgtttaagaaccactggctgagaataaacctaataaaatctgtgtttatacaaaagatcaattaagggaagataggattttgcagagattcttcttgcaaagaaatgtaactactaagcttccctagtgcattttaagttggaaaaatagcatatgcatgttttcctatttttcataaagggaggtttgcctgttttgtcattgaatacattttagttcactcttctgaggggacattcccatttgatgaagtcttttatccactgttaacaacagtggtgcggagcccccaaaggagccagactagaataagggagcacttttctgccctcaggcaatttctcctgggaatctcagtgctctggtggactgcagtatttcctgtggaaggaggtaagtgtttgcagggctggccagcaggccagcggggtccatgttctggagctgttgtcacaggttgtgggtttctaatagtcttaatagtttgaggagtctcagtggtgatcatttgaggcaggagaaggaatttccgtggtattaactgaggatttgctgcccctcagcaaaaggaaagcggcaagggaggtgtcaagggccatcgtcttctggctctcagtgagtctcagccccaaagtcatgcccttctccattttatgtatttggctactgcacagactttctatgagaaaaaggattcttatgttatttaaaaatcaaggttttaataactgccataaatgtgtatacatatatatgtatatatgtatgtgtgtatatatgtgtatatgtatgtgtatatatgtgtatatgtatgtgtatatatgtgtgtatgtgtgtatgtatgtatatatatgtgtatatatgtatgtatatatgtgtgtgtatatatacacacacacggaattttagcaaatgtatgcttttaacatgcctaaagttgtttttaaatccatgatcatgttggttcccagccatattcctaccatttttccttaaagcttaacctaaaccatatatataggatgaaaaaaaattagcacaaataagtatctttgggaaaagcagcccttttgtttccttcaaggtgggatccagggttttgcatagaatggaatgtgcagcactgaaggttcagaaccagggatcatgtttgctcagttttccaaactagcacttagggattgttatgggaatttggtttcagtcagttggccatgtgctagggtgagaggttgtggaaaagctacaagttttttgctggtcactgaatttcagcaaggcgtgtaccccgtgtgcctctgtgtctgcacgtggcgggtaagggaactgagatttaaaacagtgcatgagagttctgcctgtgctcagcaactgaagggcacctgggaaaggttcatttccttccctttctaacagatgaggtgctggaattacaggtttatttgttctagaaaatgtactgaggaccttctgtgtgccatactattggctaggaaaaggtggaatctactagtagaaagatgtttcggtgcccaactagatgaggaaggatgagaagtggcaggcggtgctgctgttgataggacacagtggaagcagagcattcggtttgttgttcagtgtttattaagtagattcagtcttatatatgatatacagattcaaaaggaaaaggattccacatacttatgaaatcagtgcatttagcaagtaataccatggagataacagctcgattaacagctcattggtcttttgttaagtgagggagagagggagtcggcctgtgctagtcattccacaaacaaaacagaatttagtcacatcacgtagagaagacacattctaagaattaaaatattaagccacatttactggtaaaactcactatatagaacacaaataatttttatagagagcattgaggaggaagtcctcacctgcttagaagagccacgttaagttgcataggtgcatatctgtaaaaatataatttagaggtgaagccattaatagagtcacctttaaaagttggtgccatccactgtttgccttaagtgcttactatctggagccctgtgcccctccccggaggtgggacctcatgaaggagctgcccccagaggaaccctgaagaaatggcttgtactatctgcactgaaagtcttaaatctcatctcagatatggaactcatgctcttccaaaacatgtctaaattatgccagaggactaaagacctcttgggttgtccctaaatcctggatggcttgatcctgaaggcaacatgagtcattctgaccttcccactcccaggctgcccagggaagaactacattcatcccacagctctgcagcaaagtcctgccttcccttttcctctgtccatgcagttacccaccagcagccaataagaggtctctcttctgactcctgctcctaaatggaccacataattgaggcatatgggccatctaccaggtggaaagtgtttttcagccaatctgagttctacgtggtataggttttttgttgtatttttaggtggaaacgtaggtaaaaagtgagaggtttttgtttgtggctttgctaagcagatgagcttagtgaggtgcatcttcctcctcaagagcaagtcttgcagaacacacagggactgggggcatctgtacatgtaaacagtacactttcactgagtccaaaattaggagcaaaaatacaaaggttcacattggtcttaggtagatacaggcgaaaaaggattgagctgtttagctcagaaacaacaaaaacaaagtttctaaagcaccactaaattatataaaaatcagaccatggacggattgaaactggtattctggtgaaatactttactattttgtaaaaagttttacaaaaaattacaaattaaaagtatcaaccctctgagttcaaagcagcattttgaaaatgaactggtagttaatcctgtaaccacccttagagttgtaagtggcccttgggaatagggatggatgggttccacctgtttgaaatcctcgaaaaccctcctaactccctgcctgtccccctccccgtcagcactgtccttgggaataaactgtcctttgtaagagtggtgacggtaaaatgaatttcagatgggttacacacactatcacttgtctacctgatgatccaccactaagaccaatgcccacttctctgatgctacccttcttgtgggattagcctcctgcaaagactctggaattggagtatcctactcttgcatttcctttttaacttaggatcccaaatgatcactttgtgccctgaggcccttcagaagatttttaaatggctgtgggacaagggctttgggagctccttttgggagaaggcagtccctctggtgagggtgagacagcagtgagcttagttcatcagaaccagctctttggtgccctccaagtcgggagtagggggaaggggttgaagctgcatcttttaaaacaaaagcaaaacaagttccctgactgagccagctaaatggaatcctgtttccatgcagaaacttgctcctgattctgccatctctagggcttcaggtgtagtttcactggaaaggaggagcccacccaagaggtggggtcgacatgatgaaatccattgtcctggaggggcctgggaggcccaatggactttaacaacatattctttcctttctcttgaaaacacattgaacctacgctcttgccgcagtactaaggcaggctggagggtggtcagttccaacagcttgaactcagaaaaacatgacttcaaactgtagcttatgctgatctttagatctaatccttgtgtgggtagggggagggagccccttccccagtctttctcactcctgtctgccaagaaatgcaaacggttcatgtctagcttgggtactgcctctgggaggagaagtgacacgttaagtaactgataccaggaattctagggtggcgattgtctctgccaggttttaacattaagattttcacaaataattgcctggggtaacatttttgcaaaagatcttactgattactttgtagtattgttcacacacaaaaataaatatttacacgaattcaaatgttgagtagtactgagcaggtggggccagatgtgtggatggctggggtgtgggagaggccttgggcactggaggttgtgctgtgctaagggtgagtctcaggtgtcctggccctgaccagaggcctggggattggtcagatggaaggcagaggtggtgtggctggatggggtattggaggccacttgagagataacgaccacccccaacctctaggggccggaagtaagcacggggtgggcaccctacctttcagagttctggacctgaggcaggatggggcatcctcactggtgccccccccatccctccttggggggagtctgccacagtgccgggaggcagtggccacagctgcaacaggcaattggctgcagaaaagctggtttgggaaggggtgcctgttctgggagcgagtggctctccgtggccatcctaggatccactcggccctggctcccctggggcctctctgctctgagggaggaaaggcaacagagggcttctgccagctctgggcaggggcgggcagcagagagctgctgtcatggctacggagtgttgcacggagaggccctgggggcctgctgaggtctgggcgagtccctggtttagcagcactggtaggtattgcactgagcaagaggaagtgcctatcaatcaatcaatcagggaggaaggaaaccaggccagctttttctttttgccctttttcacactccagggattatgggtttcttccaggaccggcccctccggaagggctggtcttaggagaacccaagtggctcctccacttccactgatccctttactccaaacatggcgcaaggggatgggagctgcagcccgccctggagctcacggctgcctgatagccggggctcaccctgaagaagtggcccctcttggcaggagtgagtctgaggggccaggcctgtgcacagaagttcagacctggctcctgggcagcggggtgtgagggcaagggccctgccaaccggctgccatctcccagcagtccgtcctgtcaagcagctgagggccagagctggagggctgcagtggctggttagggacaggacgctctctgggttccagctcctggacacccagtctggacttacttacctcccaggcagacacattgtgtgggggagttggggttacagctgttcagaacaggctcagggcacatcctggaaaaagcccacgctggagtgtgaggtagaatacaggtgaccatggactggggcttctgtagaatggggtcggggtgcctcttttgttttgctttgccatgggtgtgggtgaggtcctcctgcttggcgttgcctagggaggtgcctggtggtgtccctgtggcagcactgggatctgcaacaggatggcctggccaagggctagcggccacagggtgcaccaggcatgcagaggaacagccagcctggcacctgtcctgcccctactggccccagcccacatcagtgtagtgatatggaatgttaggtatggggatacatccttctgatcagacagacacagactagcaatctgtacaaacacaaaagaatccattttcagaaaaataaattactaaggggagaggaagaaagggtccactttgcttttctcaataaatatgcaattctgctcacctaagacttgaaaggtaattatctgggggtgggattctaacatcagggtccacgaaggtgattctaaacagagctgcagccccagcgccttgtcaggggagcccccaacccttccagagctgccccgttggcctcttccaagcaggtcagagcacccgtgtggtgagattccaaaaaaaaaaaaaaaaaaaaaaaaaagtgtccttgtgcccaaagtctcaggtgcttggagtgtggctagaaacagctcttttggatcccacctctttcaaaaacaaaatgtaccaactggtgaggcaggaagccaggtccaggctgggacagcctccttccctagggcagtgcgctccaggtgccggtggggtcagttctgctgtaggatgaggttttccagttcatctgcagagcgcagcaggaaggcagcagactcccggtagcccgcgatgagctgccgcacggcgctgatctccgtggggctgagctgagcggtgggcacgggcctgctggtgctggtgctggagggggtgggcgtgggggtggtggaggtggtagaggccccgcctttcatgctgaggtccgtgggccctgtggagagggaagtagggtgagaagggagcagccaccctgcctggcatctgggaggtgtaccttccttggcactgtcataacctatggcctagtgcccactgtgagttgggcactgaagtccgtggctctggtccatctccctgatggctctatccctagtgcttagaatgggcctgcgggcgacagggttctcagagaatcctcagggtgatcttgcaaggatccggttttaggtgaggaagaggcggccttggggcaaaggaactcctaagatctgcctctcctcagtgtggtgagcagagcttgggaatgggaaatactacttccattgaggaactgtgggacaagtgctaaaagaaagcctctgccagtgtgcctaaaggagcagcacccatctgtgtgctcttccccagcccagacaccgaggctggaaggggagatggtgtgcaggagactctgcaggtaggcaggggcccaacacacctgagagatgcgtgtggggaaagcccaggaggagctgagagtcgagccacaaaaggccaggagaagaaacatctgtgtgcccagacaagaaaggggcttctgtccagctggagagaggccagctgccctggttgtctggggggagaggtacaggccagactggccaggccataactgcacccccaggagggaccatggcagccagtggatggaggaaggggctgggtgtgtgaagcctctttctgctaagcctcaagcacctcgaatcccccctcctgggaggagtcctgtgcctgagtgaggtggagggttcatgctgctaggatacgagggagtgtgggccggaaccatcaggacaagactcagactcgcttctggagaaactgcccgccctttgtcctcggatgatggcaaagagggagcctgccatctttcaaaacacactaggggtgtgcgtgttggggaggggaccgccaggccctgtcctctcttggcctttcccaagaagctcctggctttggagtcaggcaagtgtggattcaagtcctgctctgctacttcattggcaaattctttaacttctctgggcctcagagccctcatctgccaaaactaggcggctcctgcgagcagaagctgagatgccggctgtgaaacactcagcacaggctgaggctccttctcagcccacaggaggcctgactgcctagactggcccaatagggaagggcttccaaagaggtttcagggctttctgaatgggctcccaggagacctggaagctcctggaatttgaaaagcattctacaaggtgttcggcaagaaacagccaaagaagagagaatctgggcaggtgcaggcagagctgccgcttccctgggaagccttctctgatgcagccaggtcagcttctctgttgtctgccctccccctggagtcccttccccacagctttatcttccacgggggtgtgaggctcccccagctaccctgaaagttctgatggtcacattctctcatgattgcatctccatggcagtttttatgctgctatgaagagagatggacaagctcttgtcacgggaggtatccagactggaagtaacatcttgggataaactatggaaacctgactgctgctaaaaggaagctggtgcagcccccaaatggggaaggaagctggagtctaagatgggacagtttgtcacatggggttatttcctctccggccagagaatgtggacaccaaggaggaggtcctaggaactattttctaaatagcgtccttggaattgagagttaaggaaacagttgagtctgttaaaatcaaacacagggggaaggggttggggctgtgtctggaaacagcagccaaacaggtgactgactcccagggtgttgtcacaatgcgggactgagaagcttggaacaggagtgcctctgctaacttctggatattgcaggggatggacccagagggatgcgggggaagagggtctggttctctctagggtggttctggtcccctctgcgtcatgcttgggagtggccagagcctcctggcatagtcaacatgagcagtggtcccggttcctttcttttctcctctccccaagtgctatcctgttcatgcctgtgctcagagcttcctcccttctctcctgggctgtagctgaggcttggaaaggagaaggtccctgtttcctgcagctgatctgatctggagacacccccgtgtagactctggttacagccagatgctcaggttgccgagggactgccgtatggtgggtagagggataggagtgagcatgagttacccagcaccccaggcaagacaggccgagcctgattctatctaagctgatttgcatctccagatgacaacataatgagcaaagtgaggagctctgagccattaatacggctgcccggctgaggtaccaaactgattgaacaatacttgaaaggctgaggctggggaggccagtggggctgggtggccctgcaaccacgtggctgcctgttgtcttccttcaactgctggaggatttaaacaatgttcttcaaatgaggtactagtgctcaaggacaggggctgccccaggcaaggaggtaaatgaccagatttctgcgtcagtggcctccccacccaccatgaaggaaccagggtattcacagatgggagactgagaccccaggatgcacaagggcagagccagctgcctccctggaagaatcattctctggctgctgtttgtgcctcttgggcaggtgtgaacgggcaggcatgaagcaggctcagccctaatatgagaggcccttaggagggtcagggggacttggcagccgcagccctgaaataggtcatgctgggtggacaccaggtagaggcttgtcaccatcgcctgctgctaggagggagcaggccccagaccaccctcacctcacctgctgagccccagacccccatgtgtagggggggcagggcttttcttcctggaatgaaaggagcccgcctaggacagccactccacctctcaccgtgctggccactccggccttagcttcagggattagggccaggcggcctcttattttaggttaagaggcattaggaagggatgaggagttaagcccaggcaggaatcttccagggacctgcatacacttcctggttctggggggtggcgggggtcaaggcgagtggaggcagcctgggcttcctgccatgggtggggactagctccctcccttgctgcccaggaacagtgaggggtctcctgcagccaaggatgggggcttagggaatcctcaggcatgtttagccaagaccttgcaccagggttccccagcttacaggtggcacctttctccaacctactcaggttcctcaattcttcccttcattccctggcttctgaacgacccccaaagcacatggcttctgcctcttgctctgcccattcaaaccttcttacaggggcagacagaatgacacagaccacacaattcacggcccttctgtgcttaaaacctagcaggggctcctcctgcacacagaacacaacccgagtgcctggcccaagaggtcctgtgacccaccaggctgaccccactcctcccctgcttcccttggcctcacagtaaaggggtctgaggttccccattccagttcgtgctcacggcagcacctgactccatgaggaagcctctgtctcttcgggggctgtctcctctaatggtctgtgccccatctgcgcagagtagcctggggagttaccggaaaagcacctactgaatcacccagctacaggagcggagcgagggagcaggtgtgcaccatcaccccaggtgtctcagatgtaggctccatgaatgcaggggcaagaacggaggcccagcacccaggtgaggaaagctttcacctcacaaggcaggccctgagctgaggcctggggagggagccgccctgcaggccagcggggccacagctgggccaggccagcagctgtctcactgagcctcagtcgctatgggtgagacagacggggctgcggagattcaactcaggccaagaacaggcccttggctgggactcggcacccacagggaccctgggggagtggaaccagtgagaggcgccggtagtgaaggtgggaagtgttggagcaagcgtcactggcggtgagaagggggcggtaggtttttgctttaaccaactgagtctccttcaccttccaatctaaggaccagctaagacgatgaagtggaagggtgccagagccgcccctcctgctccctatgctgtgaggcagcccctttccatcactggcctctgcttccctctccccattccgctgcccagggctgctctgcagacccagctgggtgctggtcgggaagccagagcccaggcctcccccgactcaccattactgtggtttcctgtttggagggaggcagggggctgcaggttgctgctcaaggccccgtacccgcggtaactgtagttgaggccgccgttggcgtacacagggtcctgggagtaggaggaggctggcagtgagtaggtggagtgggtgatggctgcggagtcccgcgagtgctgcttgtccagggctatgggctcatcctgcagaggggagaggggggcgctggggaaaccaaggggcagctggccccaactaccatccctggacacaaggtggataaatgctgcggccccaggactcctgggacccaatgctgcggtttgacctgtgggattctgtctgtcccctcccccagccaccttccccccgggggctttccccaactctgctcatctccctgtcagcgtatttgatcagggccctctggtctccagatgaagtccaggcttccgtatgaggtctgaggagctctgagaacaacacacctgacctccacccacctcctctccttgtctttgccctcctgttccccctctgcccttctcccgactgtacccatcacagctccctcagtccacacccatataaggcctgccctccctggctgcccaggagcggcccctgtagtggctgcggtggcaggtacctgtgaggactggtagatctctagacgcatccgcttggctgcctttcttgtctcgctctcacaggcagctgccaggatgttttctgccatggccgaggtcagatggggtggcgtgggtctggtctgcaggcagaacggggatggagctagcatggggcccgtgggggccctgggcttgtgcagagaccctgccccaggggtgggtggcacagggtggggtttgggctccagcgcctcagtctatggagctgtgtgatctttctgggccttagttccctcatttgcaaaccagggattatggtacttgcttccagggctcctgggaagaccctgggtgaaggggcccgggcatcctgggagtgtggcaggaggtcagtagtggcaccgagggaaagtgtgggccaggcaggggggactcaccatctccatgccgttcttcttcatgcgacggcaggacttgaggtacgtgcggatgcgcttgcgggcccgctcctggaactcagggaactgccggctgcaggactcgatgatggcctggatcttctccttgggctgcttggagatgggcaccatgcggtccaggttctcgtccacaaagagacgcacaaacatctgtggagacacgggccatgggaagggctggccctggccttgcccccatcccaccccacctgtttccggccggtgctcacgttgaaggccttaagacgctcagggtccatgccttcagagtcgttcatcttgtcattgtcctcatggtcatcgtggtcatcgtcgtcatcatctgccgtcggggcccggcccactgtcaggtcctcagggcagccgctgacctcggtcttgatggaatcgtagctcccagagctgtaggggggggactaaaaggagggcaagaggcagagggttgggccaagcagctgctcaagcccttgctgggtctcctacaggcggtgagcttggggaccagggtggcacgcatgccctgctgccacgagagccatagctgcgaggccctgagcaagtcactcccctcttctgctcccttcatctgtgcaatggggacagcaatgctaccacctccctccctgggctgccgcagggaggaccgactgcaatagtgtatgcagagacctggttcccggggctgctgagcgcttaggagggtgtcagctgtttcctcagcagaggccaacaccaggacctgccacgtgtacaggggaaaggcagacatggaaaggactcccaccacccgccagcctcctctcgtgccaagatatattttggcttcggggttttcctccctgatccccaaggggctgcaaccccaagttgacaaccgagctgtcaccaaagcaacgagcatgctgtctgtcgggaggaggaacagatgcgctgggcgaggtagccagccagggcgacaggtccgttcagcaggatgcgttcccgcagctcctgagctggacttctcctgtctgccccccacccaggacagcacagtggccccttgagaatatgcgggtagaaagggagagggaaccggatccggcctcccccagcagtctcctgtcctccagtagagaagggctccagccctctgctcccaccacgagtttctccctggccaagcccctcaaccatctctccttaggagcagctccctcttttcccccatgcccctccatcttctcatccttcatggctcagctcccacaccacctgtctcctgcccctgcctcggggcaccgctctgggacggctgaggaccactgttgcctttcggaaagtttgtgccttcgatgtgtcctaagtactcgttcagatcgtgactgacagtagcctggggacactgtccctgccctcaaggaggttggcatctagcaggtaaggcaggctcagggaacaggtggcggtatggtcagaccctgtgatgtggcagcatggccatggcacagcccggaagggaacagcactcactgaggagcaaatccaggaagaagggcattgcctggcacctggtcccacagcacggcccccgccaggcctctctccctgggaccaggcccgcaggggttggtgccctagggtcactggcctggtgcctgtctcttcgtccacatacagacttggataggggcaggatgccgagggcccccgctggctaccataactggccgtgtggccccaggcaagccacattcccacgccactcctcagccaaaccctgagccagggccagggcagacagatggagaaaaaactaagataggagctgctggtggcgttcctgctctcatctcacttccctgggccccccatgtaccctgtggccacagtggcaatggctgctgaacacaactcacccccttcatggaacagcagctatgcctgtcccttggacccaggcaaagcctgctctggccagaacctgctcccagccacctgtgctagacacatagcaacaactcagcactgagcccatggtacagaatgtccccacgagacattccaaatgaggcaggcagtagcacctactccactctctctgcagaagagaaaacaggcccagagagggagaagagcctgtccagaggtgtaagctccaggaaggcacctctggcccccgggcccaggttggagaagaggcactactacaggaaaccttagtggcccggaggcagcttgtggaagtgtgggggaggccccaggaagcaggggggatgcccactggtaggggtacgtactgtgcccacccttaccaccgtccatcagcctagtcaaaggaggagttccactgcccacatccctgggccctcgcccttttttcgcacgacctataaaatggggacaggcacgcagacaaaccaggcagtgggaggcctcgtacctggctgtgccgaaagtggccacttgctgttatccccagcagatgctgttctgggggagggggatgggttgtggggatgcatatccacctaccacctctaccaaggcaggggccgtcagctccacttcacaggctcggagaagggggcctggcttgggggcacactccaagccatctcccattccagagcttcaccaggaaccgaacacataccagccacagccaccaccctggctcggtgtcacacacatgggctggctccagctaagctctgggcgtatacaatttcattctcgcctcgcgacagccctttacagaaagaaatggactcagcccccagccccacacacctcgggggtggtcttcaccccgtatttgacgcggctccgcagcccgtcggcaccgcagccatccgaggggtaggaggctgtgccaagtgccgtggccggcgggagcttgtcacacaggttgatgggctgatcctcggcggccgtggtgaagtccatgggggccacggcgccgttgccattcatctcggggaaggcagggtcgccctgcgtgctgctcgacgtggatgggttcagggtggaggagccattgccgctgccactctcagaggaggagtcatctggaatgagaggcctgggtgtgaggccccacccaaggcactgtggccactgcagccacctcggagtatcccaccctgtgtcctcctcatgagtgtccctgggttggggtgagtgctgctaccccacctcagaggcaatttgccccagcccacagcctcagctgaggcagccacagggtcccctctgccagaacagaggggccatcaggaggggtgtggccaggcagggctgtgcagggcatggagggtcttcctgcaccccaaactcgcaagcgttatgtccaggcttaagggagaccgagctccaagggtttgggagtgagtggcctgtcagagggccctggaggccctcgaagcccggccaggctctcccttctccccagctcccaggaccgcacctcccacccaccctgctcctgctgccgggcactgccttgcagcttcgagctctcagagcccctgcccacggtgggccctcaaatgtctccttcctctgccggaagcaggaaggatggctctactgtgacctccagccattcactccctcctgtaagcaagcccagccctggcagcctaggcacaggcacggtggcccccgaatctgcgctccgtgcaggccccacggcctgggacgtgcaaagccggggctgcaaggtctggggtctgcacgcggcccccgagtgggcctgcccggcgtctcagggtgggcagccccggcaaagcactgcgagggcgccccctgccgcaaagagcgcggcaccgccagcctgcgggcgcgggggaggaaactttaaccaggggaccagacagttccagatacattccaggcctctctgcccacccagccccagccccagccccggcctcctgcttgctcagctgagacggcagaggctgaagctgcacgggaactcccggggtcactgtcaggtgagcacccgcgagggtcccggggaggtacgggtgaccctggcggctccacacctgcacccagagtgggtgggggaggggtggtcacagcgggccctgccgccccttcccccaggccagggtcacgccggaccccacccccaccctcccagccggcagattatgaagatttagtccccggtgctgggcactgggcacgcgcacctccagagcgtccccatggcgaccgagcggctctagcgccccaaccaattgctggcctcccggctgcccgggggcgggtccaggctgcccatcatgcagccaggccgggcagagggggatgggaggccacggcggcgcagtgcacccctccccctcggctgcagcaggtcccctgggccaggcgtcctgtcctccttcgggcagcctagctccaccactccctccatcctcccgcagggcagctccgggctctgctcaaagcccgcccatagctgcccctcactggctgcatcctcggagtcccggcccgcgctggctgtccccgggaccccacagcctactcgcgcccagtctggagccaacacattccccagcatttttactgagcacctactgagtgctggcctggaaacaaagtaatgactgcaaccaaggtgccagacctcctgggggacagatgtgccttactcagcctcgtgggtaacagggaaggtgaattgtgagaatgggggtgcccactttcctccacccgggaaccagaccagctcctcatgcagctcccactggctgctctccagcgcccaggccacccacatcccacctgtgagagccaggcctaatcctcactcccctgtcccatgctttcctgtagctgagtaagagtccggcccacagccactggcactctcagtcctgtgacctctgcagtcccccagcccagcctcactatcctgtgctggagctctgcaatctgcctgccatgacacctccagctgagcagatggcagccagccttcaaggtctggttccacactgccacttcaggctggcacttttctccactgtccctaggaaggaggcactcacgcctccaaccccagcttgctgcccggccctgccagggatcctcatgctcccttcccctggcccagggtcatcgtgagggccatctgccccaccaggacagaccctgtcaccagagaagcccctgcacctgaggtccaggagcctccacgggggacagggatgacacccatactggctggttacccacgctcccatgagctgcagggggcccatccttcacccaccttgcaggtgcgacttcacataccgacaccaccctcacaggccacttgcttgaccttggagggccttagattcctcctctggaatgaggggctgctcctcagtgggcatcgtgcctggcacacagtgagcaagtggtcactgccttcatcacaggcaccaggcccaaggctggctgcagtgccacaccctacataggcccagaagtgacatcccatcatcccaccacccacctcccaatcaggttttcccgagaagatggacttgccctccgccactgtgagctccagagacacgctgctcagggtgctcctggagcctctaccaggtcagatgcccggcacgggggcccagactctccagctaccaagacctttgcctcggggctgtgcccccggctgcctggctggggatcgacaggcactagtgccggggcagaacctcccctaactgcactcagatgccaccctggtctggccagggaagtggttgggcgggtaagacccgtaaggcaccaggtgctaggacctcgtatggccaagtgttccaagctgttagaagaaactggaaatctgcaccattatgtaaacagattttaaaatattggcgactcagttacatggtttactttttttttttttttttagggtcttgctctgttgcccaggctagagtacagcggtgccattagggctcactgcaactgctgcctcctgggctgaagcgatctccccagcagcgcacaccacgacgcttggctaattttttttttttttttttttgagatggagtttcactcttcctgcccaggctggagtgcaatggggcgatcttggcttactgcaacctccacctcccaggttcaagcgattctcctgcctcagcctcccaagttgctgggattacaggcgcccgccaccatattcagctaattttgtgtatttttagtggagacacggtttcactatgttggccaggctggtctcgaattcatgacctcaggcgatccgcccgcctcagcctcccaaagtgctgggattacaggcatgggccaccgtgcccagcctcggctaatttttaaagttttctttttttgtagagaacaggtctcgctatattgcccaggctggtctcaaactcccaaggctcaaaccatcctcccactttggcctctcaaagtgctgggatgacagacgtgagccactgcgcccaacccattatttatatttttaaaaacttcgacaagtaaatgggtacacaaatgtggtctattcatacgatggaatagtatccagccatgaaaatgaatgaagtttggataagcgctgcaatgtggatgataaaaacacgaggctgtgggaaacaggccagacggacaaggatactcagtgattccacttctacgcagcatctggaacaggcaaattcacagagacagaaggtacagtgaggctccacgggctgggaatgggcagttagtacttaaagggtgcagagtttctgttgggggatgaacaagctgtggaaataacagtgcttctggagtgtacacttaaaaatggcaaattttatgtcacacattttaccacacacacagaacccagaccaaaaacagcccctttgccctagtttataggctctatctgccattatctcattttctcatgccgcacacacagagcctactcagagggacaacatggatcgcgaaagcctgccttccccagtgacaccaaggtctcgcctacccccagctccgctcaggcagccccggcatgccagcccccaccccacacagctgcccccgcgccacatgctctgggggctgcctgcaacctgaggcccatgttttgccgactggggaggccacaggtttgagccgcggagtggctggaagaggctactccaccttctggagcctccgtttcctttcagagtgggtcccacagccgtaaaacacggttctaaggtgaggatggtgcccgagatggggcaggagctcaaaaggaaaccccaattccctgcaccccacattttctcacatcataactcacccactgccgacgcacgaggctcccagactgcaacgggggcttctggggatcccggagcccagcctgtgacagtctgaggtgggcccagtgagagggccactgtggggatgggggcaactgccaccctcggagctcatgctccagcagcgacaaatcaaacctgagggctccagaggagacggggctctgaaggggtgtcaccagctttctggcccctgagccatggtgtctcccctactctcggcgactcctgctcgcccttctgtgctaacccgagcaccaccacctcagggaagccctccctacctgccccgatctccatcgtggcaccggctgtgggccacggctctgcagaagccatcccagggacggtggggcgagggctgaagcctcatgaaccaacaggggcagaggtgctgctcggggtggggttggtccagcctgtccctcggccccacaagcagtggatttgatgccggctgcagccgcaagggctgagtttactccaactggaagccaggtccctcctttgggcccaccaggcccttccagcgagcccctatggctcacccacccgccccagctgtgacccagccttggtacttgctgttccctcttcctgctccactctgtcccgggtgtccccttggcgcagtccctcacttccagggctctgcgtaaaggtcaccttctcggtaagcccagctcccaccctgctctggcacactgacccctctacctttcttttctttttttttttttttttttgagacggagtcttgctctgttgctcaggatggagtacggtggcgtgatctcggctcactgcaagctccgcctcccgggttcatgccattctcctgcctcggcttcccgagtagctgggactacaggcgcccaccaccacgcctggctaattttttatgtttttagtagacatggggtttcaccgtgttagccaggatggtctcgatctcctgacctcgtgatccacccacctcagcctcccaaagtgctgggattataggtgtgagccactgcgcccagccccctctaacacagtagtattgcaaggagaggataagtgcttggaagaaattacctatttcttccaagcacttatcctctccttgcaatactactgtgtttattgtgtctctggcctgtgcccagccttcacagaagcggccccagccctagagacccagagttggtgcagctgtattgggtgggcctggatggctcctgctgccccctagatcacacccctccctctggtgggggcaactgagtcttcctgggctcgccggggtgagtgcatgccccaggcctggccagtcaacccatcacagcaactggtaatagcgtgtgaccaagctgggcccgaggacatcacgcggggactcctgctgcgatggctgggaaggtgctctctacctggggttgctgggcccgtggtgcagggaggcccacgctggggaaagcagggctgatagggggcacagatgatcccctgaaatccatctgtgcctgccacctaggaaggccctagaggttttggtgagggagctaataatttccttattggttaggccggctagaggcaggctcacaccaatggcttggtctctgagtagtccagggtcttctccctggcagaggccaagggatgggacccgggggctgggatcgctctgcatggggacctcaccatgacgcccagctcagtcctgaggaggctggtacccacaggagggggtggtgcccacaggagggctcatgcccacagaaggggctggctgcaaccctcacacccacccctcactgcacctggccaggagaacgcgcctgtcactgtttggggaaagaaggaaaagagagactgggggcagttgggttttgatccgattggaattcttcctcccacaacccttaaaaaaaaaatggatttaggccaggcgcagtggctcacgcctgtaatcccagcactttgggaggtagaggcaggcagatcatgaggtcaagagatcgagatcatcctggccaacatggtgaaaccccatcactactaaacatacaaaaattagctgggcgtggtggtgcacgcctgtagtcccagctactcaggaggctgaggcaggagaatcgcttgaacccgggaggtggaggttgcagtgagacaagatcgcgccattggacttcagcctggcgacaaagcgagactctgtcttaaaaaaaaaaaaaaaaaaaactgatttaaaagagacatcgacaggcgcacaaacccttgctgtgatggaatgcagtggggcccgggcagggatggtgctggtgtagggtcctgcagtctgggcgaccttgggcactgccacctcctgggcctcctcttatctacagtcctgggagttgccgctgacgccctcctgggctctggcactttatgactctgtgaagaaacccagctggctccatgggcaccgaagccccagcacacaggcctcacggggtgcaggcctccagctgggaggctcagtgggaagctgggagttctggatggaccctccacacctggagctggaagtggaacctaagggtgcccaggtgacctcttgtccccacctggtccccatcttgctgcttccatgaggcccctccaggagggtcacccttgaggccaacctgctggggcccagtgtgatgaaagcagggtgggcctgcccccagcccatggctgcgtgggcagcagagacatgtcctgaggggccttggggaagcagcccgggatgcaccccctctcagcatttccacaaaaccaggccctccccactgtggcaaagggcgactccttcatctgggcaggacccggagcccaccacctgtgcccagaatgcctacgggcagggaaggactgccgtgtccgtctatttgaacatggggcaatgtgctgctattcaaatggaggaattagtgatgaatgggggaaattgttcctccctctgtcccgtctccagaaggagacaaaaaccccttttacctcagcaaacaatgcccttatgtgggcgccagtgccccgcagcccgcacaagcccagctctgtgcgaaccaccaatcgccacaccgcgctctggggcccacagccagtggcaccctctcccggtgggcgactcccaccagctcccaggctaggctcggagaacgggaaggcccaccatccctgggaccacaggccaggtacacggccactggaggccagcaggccctgcgtgcagactgccttccgtgtccagaggtgtggctgctggaggcagtgccgcctccatgagactctgtcacagcagcagccaggcgggggatgggaggggcatcaataattcacacacaacagggcgacgggggaggagggggtgggagactgctggagccacggcccaccatggccagggaggcgtggacagtagggctatgggctgtggtctgggggtgctgaccctgctctgaatttgaggcgtgcacctccccaggactggccccctgcctgctttgacaaaggccagcgcccaggctgtgtttacacgatgcgtagttccaaggagcaccaggctcagggcaggctgcccagctcttcctccagaaaggcaggaggggtgcaggggtcaaatgggggacactaggaccctaccatccgggtgatggggccacacggggcacctgcattctccacgtggccctcaggccccagctgcctgcacagctgccctcctgagcgcccagctctgtccctgtggttcacacagcctggcccggccccagccacggagcagggagcccatgccccccatctgggtgccacacttgccccctgatttgcagccccggggcgccagttcctctacccccacagcatgcgcctcctctgcgtgtgcccctcagtgcccgggcagtgggcgttcctgctgaaactctggtcactctttgcttaggcaggtgccaatttaggccctcacagtcgggagcagcactgtccgacagaaacagagtgggagccgcatgagggatttgagtgccctagtacccacattttaaaaagtaataaagaaacaggtgaaatcaattttaataatctactttatttaacccaatatatccaaaatagtaccatttcaacaaataattgataccgtgttatcagagctgagatatttcaccttcttctttcctacggagccgctgagacgcagcgtgtattgcacacctgtctgcactagccttttccaaggctcagtagccgtccttggctaatgaattagacgtcacacacctagatcttcccctaaaactgaaatcatttctctctgcagagaccctggggttcctggcccgtagagaggtgtccaagctgcagatgatgttcaggccttgggacaggtggctcaagcggtggggccctggagacagacaccaccttcagtggagggggaggtggacaccaattatgcgtcaggtcccgagtgtcaggcggcgggtaactcatcatgcctgatttgcacaaccaccctctgcagcagacatcagggaggaaccagaggctccagggggaagtcaccgacccatcacccgggatgagtggaggcgcccagacaggccccaaagcaccacccaggccgcccagtgctctcagacattctgggagcctccaaggccagccttgatttgcccatctgtactgtgggacaattccctacccctgctaccagactgctccacttcctagagcccctcccccaacacctactggccactgatgccccggggaagcgctcccaggatgaactgcctgtgtgtgggtgttctccctggccccgtcctccaggccaagcacaggcggtgagaaataaacactaattcagtgtgcaaagatcgagccgagacacacagcctgctccccgtgttctcagagcaaacagagccactccaggccaccatgtgtgaatgattcacggggcagggccctggccccaaagcccctgcaggccctcctccagccctcccggaagccagtctgggttcggtgcattgcagtccttaggtcggagtgatgacgccaacgcggcctggtcacttcctggttcctgggaaagtcacccttgaacaggctcccggtggaggtgcctcaggagggcctgtccctgacacaggagcctgcaggatggagctctgtatgtgtcctgggctgaggggtggtggcgaagggcaagggcactgatccccacgtggccccactgggccaggctcaccttcacctccattctttttttttttttttttttgagatggagtcactctgtagcccagtggtgtgatcttggctcactgcaacctccacctcctgggttcaagcgattctcctgccttagcttcctgagtagctgggattacaggtgcccatcaccacgcccagctaatttttgtatttttagtagaagtggggttttgccatgttggccaggctggtctcaaactcctgacctcaagtgatctgcctgccttagcctcccaaagtgctgggattatgggcatgagccaccacgcctggttcacccactttctcagtaggtgaacctctcggctcctcaggccccagagcttgtcctccccagcatcccagacaaggccagggctgtgtaggccctgcccactcctggataaagggatctctcggtgctgtctcccagcgtctctcaccccttggcgggccggggcccagcacagcccagcattgtctgtgccgcctgcggcccagctgatgatggacactttcctgtgacccgggactgccagtgtggcccacagccaatccctggaaggcttgggccccagctctctgctcctgggggaggggaggccaggaggccgccgcctgctcatctgttgtgggtatttggagccttgaggaggaacaaacagctcttgctcctggggtgggggtgggtgggacctgcacccagagaatggggcccagctctggtttctggcctcagctgtgagaattagggtcagggcaatggacacagccataatgagcaggtgttggggagaaggcttggcttaaaagcccactgcaagagaagcctttcacaggccagcccagggaggctggtgcaggggccacacctcctgccatgcaatactgaccagagcagacgtctggccatgagtgttgggtccacggggaggcagcagcaggccggagttctgtgcctcctggtgggagagggctgctgtgacccagggatgggcccaggggagggtgggcatcacctgaggaggacactagaaagagccgcggcacaggggtaatgcgggtaatggtctctgagcccgggtggcctggtcgttactcccaccagctccttccccatcagccttatggcttcctgcctgatccctcacttgaacggcttcacgctgtgctggggacaccccatggcaccctgagtaccagaagccagaagcacacttctgcctggcaccttctccttggatggcagcactgactcctcgctgcctgcttagctgcccatcagtgtgggcacctggatgggtctggcatttgccagattgagaagcagggtcttgggaacttggggtccctggacagggcctggcacatgtgggtggggagggagggacagggactcaggacaagctgtgagtgcctgggtctggttgacaccaaggaccccctagcccggctccctttacgaagaagcacaacccgggcggtggttgggagctgagagcaggggtggggatgccgctgagggtggctgtgaggtaagctgcagtcagggtcccacaggcctccatggcagaggggaccaagggagaccaggctggctgaggaggcaagactggaccaacggggtggtgcgcagggctcagagaatctgggggaggtgaggaagaccgcccacatccagtcccagcctggcccccaatgggcctgtgctgtccacatctggtcctcaaccgcctggcaaggtgggccaagatgatcacccccagcccagcaaggggttggcacccgcccaaggctgcctggcaaggagggaactgagcaagatctgagctctgtgtgcccccacacttccctgcagacctcttggaggccagggaggaggcacacaggggagggggccgggccaaggagaagaggccaacagcactgctgctgtaaataccgagccctgggcactcaggaaacacacctgctccccagagacccgccctgctgcccagtttgcatttctgggtggtggagggccccacccaagggcagcaggggccaggaggtaggaagccttggtcttctcactaagagctcctgggggcatgccaggatgaggggccacagcccccaggccatgtcacagagagaagctgtggcccagagttgggggatcggctagctcaagaccatacttcggggaagggccggccagatccatggcacagcacccaggacctgcctacaggatgccacatattgggcccgaccactccatcctcccagaacccttccatgccagaccctccccagatggcctggctgtggcctctctgcccttctctcctggttggagcttggggtcatagggagcttttggaaacaggtgacccaagaaaccctcaatcctggcatcgggcacctcctcccttcccagccccctgctgccacgcctctgcccagcttcccaggccacctcctcccaggccctttctctgattccccatctctgccaagagtgactcagtggccgttggttgagcacctattcagtgctagggcctggggataaagcccaggacaggagactcaggccacatggggccagccctgaggggcaccctgcagcgccacttccagcaatgaaaaacagggacttggccaagcacggtggctcacgcctgtaatccctgcattttgggaggccgaggcgggcagatcatgaggtcaggagtttcagaccagcctgaccaacatggtgaaacactgtctctactaaaaatacaaaaattagccaggcgtggtggtgcacgcctgtaatcccagctactcgggaggctgaggcaggacaattgcttgaacctggaaggcggaggttgcagtgagccgagattacaccattttgcactccagcctgggcaacagagcgggactccatctcaaaaaaaaaaaaaaaaaaaagaaagaaagaaagaaagaaaaacagggacttgagtgtccttccacaggagtggccaaaacgctggctctggagagacccagtccctgtggtctgggcaagttacttcccctcggagacgatgtttcctgccctgtggaacagcgacatgtatagctctgggctcacagggtcaggctgggcacacagcagggtcaggctgggcacacagcgggctcaggaatgggaccccagtcactggactgactagacaagctttgaactgtggctggcccacatcagtgtcagggaggccaatgactatgtgagaaaaaaggcgccaatactgcctcattgaaaagaaaatgaggctctggttacttagatacatagaaaagtctgagaaaaatagggccccagacatcattatttttcattttcttttttcctcctttatttttctatttttttttcttttttttcttttttttagatggagttttgctcttgttactcaggctggagtgcaaatggtgtggtctcggcttactgtaacctccgcctcccgggttcaagcaattctcctgcctcagcctccggagtagctgggattacaggcatgtgccaccacacccagctaattttgtatttttagtagagacagggtttttctatgttggtcaggctggtctcaaactcctgacctcaggtgatccacccgcctcagcctcccaaaatgctgggcttacaggcgtgagccaccgcacctggccttctcctttatttttctacaataattgtaatacttctgaaataaggggagaaataagggacatttctacaaagatgtggctcctgccctcagcaagctgacagcctgcaggggtcccacactggtgcctgtttggcttcaaccaaaccccagactcctccagggaggtggggacagggctcatcacccctgtgtgtcacaaggccaacgctggtgtgactaaagtggccaagaacctggaagagccaaagggccctcagtgcctttgtccagactcaggcctgcacagtgcgggagcccgtgtgtcccgaggcccaggttggaggagcggcctcatctgagaggcgcacacaccaggccctgacctgccccagccagggctccacacgactcttgctcagcaatcccccgactgcccaccctgcagaaggcggatgcaggcccagcgagcagacccctgctctcccctggcgctggcttcctgtctgcccaggaggtgagtaatgtccgctccctgcccccacgcatcccttctggaggccagacgggcctcacattttccgctcaggaaggggcagagtgagaggcctgctgaagcacatccaggggaaacggaaggagtggccccgcctgccgggtcaggaacctgggccagccccggcctgcaggaggcgcactggctcacctgcctccgtgcatgccttcgttcattttcatccactcattcattcaacaaacagcaccccagcacctgcgtggtgccaggccctgtgctgggtgctggaggcctggctctcagggtgcttatggtacttggggaggagactgcatcaaacagatcatcccacaggtggcggcgtaagtacagacggatgtgctgttcagccccaaggcaacgccagaccacagtgcctctggacaaagtctctcaggcatcctccctccacaccctatgatgtgcacagagccctgttcagacccaaaagaaagcccacgcctcagccggggcttggccgagggtctttaggggacctggcccgtgcctgggcaggaaactgtggcaggagctggcccgcatggccctgggccccaaggagggagcgccccaagtgtgtggagagggccttctttggttccctagctgccctgcccatcttctggggaccctcacacatggcccctgcccctgccaaaggggagagaggagaagcactggcacctccccaactctggctgagttgccccaagtctctccctgatcctaagtttcctccccatgagatgagggcactgtgagtggtgctccctgccaagcaccagtggctgtgatcgcagggacctgggagcatcccaggacttcagagtgtggggaactggtgtaaagaggtctgggagaccaagactcgcagccagtggcagggttgggggcagaagcctaactgtgtttcaggacaagcagacactcaccccggtagaacctcagaggcaagctcccggggagtgaaagctgtggcacccgcacaactcactcttgggctcagtttcaggacaagcagacactcaccccggtagaggctcagaggcatgctcccggggagtgagagtggacactcaccccggtagaggctcagaggcatgctcctggggagtgagagcagacactcatcccggtagaggctcagaggcaagctcccggggagtgagagcagacactcaccccggtagaagctcagaggcaagctcccggggagtgagagctggcacccgcacaactcactcttgggcccagtggtctccgccatgggatttgctctgccactcagccttcatctgcctttgttaaaatctttaaagaagggccccaacaaatccacagctgtagatctgtgctaactgcctggctccctgaaatcactcctggctggatcacttgtcagcagggatggggtgctgatatggttgggatctgggtcccctccaaatctcatggtgaaatgtgtcctccagggttggaggtgggcctggtgggaggtgtctgggtcatgaggggcagattccttatgagtggctgggtgctgtatggagtgagttctcactatgagttcatgcgagagctggttatttaaaagagcctggtacctcctccctctctcttgctccctctctcaccatgagacatgcctgctcccccttcaccttctgccatgtctgtaagcttcctgaggcctcaccagaagccaagcagatgctagtgccatgcctgtacagcctgtggaactgtgaaccaaataaacctcttttctttataaattacccagcctcaggtattcctttatagcaacaccaaacggaccaacacaggtgtgtcatcagcacagccttgggagtccccacactcccggcgaaaagaaaaggcccaggtactcagatgggaaggatgtccccagaaacaaacaacccaacttatcccccatcagaggcggagctccatctgctctgcaatggtgtgcttgggtaggtctcagtaaatgtttgttcgtttgttcattcggggataacagacattcagcaggtaccgacaatgggccatgttcgcaaccgagtcccaggggcagggcagagaccaagactgaccttacagcaggcctcagacttccacgaaggacggaaggccagagcccacacaccaagcccacctgggcatcagtggggttggggggcttctgcaatggagaccctcgggcggggagtggagcacacagagggctaaagcgggtgcctctgcttgggctgtccctgcctagtcctgcgtcaataacaggggcctgagagtgctctgatgggagccccttgactcactcatgggagctggacctcacatttctgcaccgtgagcaccttcaagaggggctggttgtatgtctccaggggggccagaagatggcccaggactctaggctggaaacccactgctctggacagacaccaacaggcccacaggcccagaagaggcagcagaggccaggccagctgcctgggccttcccaaggcctgtgccctgcccagggtctcagccagccagcggggtggcccacaactccatgagtgtctcggaggggacagtgaggcccacggccctgtggtcaacagcatcctccctgtcccagctctggtgtccatcaggaggggaaggtggtgtctgactaccccaggctgaccccgcactgggctcttggggacctacagaccccccagcctccctgcatctctcagcctcatcctcatggccaggccagccagcctctgggcagcaggtgctgagggaaccccatggaccccacagaaatgccactgtcagctacctgatcctgacagcccccaaatcaccagacctccccaggacgtgtctccaagagagatcacgctctcaaagggtggtcatgaggaataacagcatgagatctgcttgggaatgagtagggggaccatggtcccttcagccccactgctctgggtttctgaacaactgtcccagacccttcttgtgggggaccacagcctgtggccccagctgggctctgcaggcaccgccctcagtgttccttgggcgtggcctcaatcggctcagttgaggcgggaggtcagctgctgcgcttgtcccagccccagagccccccagagcacgtggctgcccccgccggtccccacccccgtgggaacgctggaaggcggcactggcctgggaggctggcagcacgagggggtcgcaccgacctcacgaggcatcaagcacaaaagccttttctttgccggcagccacgcaccccactcctcctgcagccactccctgtgctccccagcccctggcccagacacctccagctgcctccagactgggtctcctcccaaacaaagccggattcaggccttcgggaggcaggcgcgcaggttctgccatggagatgaactttgacccaaacagcaaggctcctaccccttatttactctttaaggctgacccgtttcacagagttcacattacacccctttttaatccgcacctccctcccacattccaggcctcgaccttcaacccctcctaattgctggctccggctcctacaccccagttcttgggcccagctcactcatccctgcccccaaccatctcctccacggaaacaaaggcgatgctggggtgctgtgctcacagggccacctcacaaccctggcacaccaaggtagatgccagggtcccagagcccaaccacttgggggagtccacgtggaggccggggtggatctttggggtctgattcctgaccctaactctccaacccctgagaaggaagcctctattccaagggaggctggagtaggctgcctggcaggccctgcgcggaggcggtcagggctagggaagaatccggacagctccccagccagccgcatcgcatcccaaggggctagggtgaatgtgggcagctgcactgcctggtcactcaccaggtgacctgggctatagcctcacatgtggctgcagaaacacagcttgtttcccttgctgggcagcggaactgctctgggttaggtacactgtgaaccttcccaggcctgcccctggtaactctgaaacccacattgcagaagcccatggcatcccggcaaccaggcagaccccccgccccgcaggctgccagtcctatgggctctctccctcatctttgggaggaaggagccaggagctggggcactggggcccatggagatgctgagaacactgggggcagtgcaagcttgggcctgagccacccaaaggccttggcccagattccgccaccctggagtgtgtccacacctctcacctgaggacaactgggagcagggggccgggcacagcccctcctcaactgccaccaaggggcactcaccgtcctcttgactgtggaggttctgcgggctccgcatcctctcgtcctggctggggctcaggctggaggccaggtgcgggtcagctgacatccatgtggagtcgctcatatcaaaatcctcgctgctcacagaagtctcatcctgagcagggacaaagaaggtgggcattcagcagggacgggctctcatcagcctgaggcagccttgtgggtggaccccagggccagtgggcgtttgggagtgccctgaaggcggcaggagccctcaaaccttgaagtgagggctgggtggtgctcccccttgcccggtggaagtggccccggctctggttcctgtcggaagccaaggctaagggccggcactgtctgtaattgaagacaattatgaggtctcgcatcctgcaggggcggatggcagggcctggctcttacccttgtgagccaaggttgaaacaagcgctgtaaacaagggctgccgctccctgctctcagcccagggaccggggctcactctgcacaggacccggcggcaagaagcgggcagcagcacatgcccgccaccaggcactgaggctgagctgagtgcccccagcaggcctggcgccctgactcccatgaagcatgcatggaattcctttctcccactcccccagcccagaggacgtttctgtcttcctccttcctaacctttgctgtgcttcaaagatacgctcttgggcagcttccagggctgaaagggccagccccagaagtgcagagaaggaagggggcggggcaggccagggttcggaccagaccgcaaagggggttcagctcaagggcctggggggccgccagggcgttccaaacagccggatggcctgctagagaggaccacgcctgcctcctctctcctcgctgccggcttcgggccggcccttggccagtcatccgggaacccccggggcggggccccttcaacccagccctccagggggaagggcccccacctcctccaggcccagcctttcaggagcagcaagcaactgtgcctgggagctggctgtaaaaccaagaaagatgacccagcagctcccacacccggagttctggcctccccccagcaagacacaatggcctctgtgggcccccagtgaggacctctgacagagcaccccccaagcctcccctccggggcccccctcacagacacctcttttatagtgagcaaacacactttggttggaactttcttagactgctgtccctgaggcagacacatctgctccaagtgctagggaaccagtgtggattcgcctccactccctcccccaccggctgggctggtagggagtttcctggaatttatagcttctgtgcagtgtggaccctctgctgaatccagaggacaggagctgggctgtgacgcctgtagtccccacgcggcacacccagggcctcgggggatggacagagcccacgtgtcctctagtgtcctctccccacacacaggcacacgcactcactctgcctccctcccacaggctgcctgctccataaacacaagcacctccacccacagccctccttcgtgaaaactcgctcacacacccggagggacacacacacacacacacacacacacacacacacacacgttcaaaaggctctgcacaaagggtacaaagggacaacaaaactctcccctgtgctaactggatggagggagacgaaggggagggggaagagaggctggcaggtgggggaaggttccttggagccttgagcaaggctgcaaggtgcagccggctccccatcttcccagctggtcgtgccatgcgggctccgggaaccaggaacggggcatcttgcatgggccccttgctacttcctggatgcccagggggtgccatgctctgggtttgacctgaagtcacagctgaaggaggaagactcttgggtattgttcaaatgctcacgacttaaaagacagagtattctagtaacagttgaaagtgccacctactccaaactccccatccatccattcgacaggtatttactgagcacctgctatgggccaagctccgctctaggtgctgggaaactcagctgtggaccagacacactcctggcctgcctggcacccctcgatccacgagggagatggacaatgagcagaaaaacattgatgacggctgcaaagcacatggaagcagggcaagagggcagagggacctgtttgccagggcagcccagaaaaaccccacgggtcagaaatgctggagcagaggcctgcgagaagtgaggaggggagcccatgaggtctgtgtggctccacgcaagtttcaggcacaggcagcagcaagtggggcacaagctgctgggtttgaggagaggcaaggaggctgctgtgggcaggcatgggcgggcacacggggacagaggagccacacgaaaagttcccctcccacagtgcacgtaaccctggcagggccgtacctgccatctctaggttggagaaaggctcttgaactccactcaatacgcacactctggcctctctcagccaagttcaaaccataacaacagaaggcaaagcttctcaggggcccagcgctcccctggacttgtggtatttcaccctcactacaggtccaccaggtaggtacagttgacagccccgctccacagatgaggaaactgaggctccaggaggttaaggtgctcgcccaaggtcacgagctaacacgaggcagagccagatctgtgcaatcgccaaggactggacacgccctcctaactgagttggccctcgcctagaacccacactgctgctgtgaaccacaatcccaattccaagctgtatccagctgtcactgtcttgtgggtctctgccctgtctttccctggaaaaccttcggtccttccaacagtggggaccagactgtatgtcctctgaatcccgcacaaggcagtgagacttgttgaatcaactgaattgcctggcatagtgttggtgtttaatgaggacgctccattaatttgacaattaaggactctggtcccattgcgcacagttcttgaatggagggcatatgaagcccaggatgcaggctggtgggctggtggcaccctggtgccctgcaatgcctccctcctgccgctgccagccaccccacacacagccagggtttctctggctcacatcactgaactgttcacccaaatgccccctccaaccctcactcccttgatgggtcccactgggaaaaggtgggctacacctaacctggcatcaaaatcacctgattaggaggagcacccagtgcccacaggcacgggacttcaggctaatggttttattagatttcctcccatgaccccataacacaggcacccacgtcaggcctagctccagctctgataactgcccctgcgaggcccgccccgcctgccccaactgcccaggggcacgaagccagcagcacagctggtgtgtagacccaggcagcctgtgcccagagcctgcatcacactgtcaccgcaccatgggccacctcaccacatctcctcccttcaatgggaggaaccagattccttaacaaccaagtgtctcaagatgaggcccagagggaactcatgggtgatgaggctatatttacacacacacacacacacacacacacacacactctctctctctctctctcatgcatgctcactttcttcaatgagttgttgcacatttattgagcatctactatgtgctggcactgtgctagggacatagataactaaggcagggctcctttacaccaggccttgttagctaggaaaagggaccagcaaaacttctgacccacctgtaggtgcagtggggagacactgtggacacactgcctagtcacctaacgatgactgctttctccccagctccccaggaagttttcccacagcctccagggttctgccatgtggaccccagttttgtgaaaagtggttctaagattctgatatcttgactgctatagcttttttgaaagacaggatcttactgtcacataggctggagtacagtggtgcaatagtggctaactacagcctcgaccccccaggctcctgcctcagcctcccgaggagctggcactacaggcatataccaccacgcctggctaacttttaattttttgtagagacaagggctcactatatcgcccaggctggcctcgaactcctgggctcaagtgccttggcctcccaaagtgctgggagtgcgggtgtgagctgccacacctggctgcgacagcaaattttttttaagtgagaaatcaagtctattaagcctaacttttcaaaaacacacaatacaaaaataagttttggtcagacttacacaaacccttcaacacccagactttcaagggctgaggtagagaagaagacttcccaagacccctctgcaacctgtctggcgcagcacagcccagttcatgggtgtaagcccccctagccgcagatgggcagactgtagctccagtccctcactcacaccctaagccaaggctggagaagcaggctaatcacacaggcagttacaagtacacacagatcagaacccgtcaacgacaactgtgcagagggggaaaatacacccaagtccagagggccatgctggaggcactggtgcaggtttgagagtggccaaggcctcaggcctgctcagagacccaaggtgctcactggctcacccagaggtcacagggcgctttttacttttcccttcaggaatctcagatgaattgagggctattttctccctttctgttaacaaacttcaacaaaacttacattagagaataaaagtgtgggctgggtgtgatggctcacacctgtaatgccaacattttgggaggctgaggtgaatgaattgcttaaggccaggagttcaagacccacctgggcaacacagtgagacgctgtctctatttacaaaaaaaaagtgtgtgcaatccattacttctgggttccctctccccagtccccatgtgactggccagtcagctaccccctggtttctctagcctctgccctttggacaccctgaagcccgtggccttgcccacccagcaatcatttattccagcaccaaagccatcatgggtcacagggtaacagagccaaagccaaatgctcttctgaaaagggaacttaagagttaggcaggcagatgggtagcacccagtcagcctctgggacacaccccaacctgggagccctgcctctggggcagagggagaggagctgaccagactctccctgctcttatcttcagtccaaaattcatggacaggttcagtctctctccacccagcttctgaggcccttcctcttctgcatggtaactagcacaaccactgcccagcccaggaggaggagaaaacgggagaccagaggggaaatggtggaaatgggcctgtatccatggcttgtaactacgggcaggtgctatcagtaacctgattattttacaactggggtcaatttctctggaactgggttcctggtgcctctgaagttgagccatttgcatcctccaggacttgggatcctggggcgtgcctcacacggtattttccagacccttcctgagagctgtaattctatctctacagcttgcttgagaaagaaaaggaggaggatttgctgagaatttagtgcaattttaagccataagccctgaccaggagccctgggtgtgtgtttcagaggagggcaggggcagggatgtgcaggggatgtttctgggccaagcaggaaagagacccctctctatacagcccccaggcttgttcgacaggaggctaaagctcccactgggaagaacaccagcctcagggggttgccccagcaccagctctatcccaaagcggagtctcttctcaacccactggtgggcccctccttctggacacctgtaggccccttccaggccctggacattcttccacacgaggcgactctcccccttgtctccatgtcagcgagcattacacacgcagccttctgagcatgccaagaaggtactgaaccgcatgtgaccccaacttaaccacttcagttcatcagatggcttattaatggaagacgaaaaacccccagcatctaaagcaacaggggttcaaatccttgttgtgaaggagccgcacacatgaaacaggagggtggtctgagccacagctcctggggggtgtggggtcccaaggctgttgcttcatggctacaccccaagcccacctagccaccagggaaggaggccagccttccagcactccctgcacaattccactccttcctgcaaacatgcctcctctgcttactagccatgcaagcaccagctcttctgggaaatatgaggcaggaagggctgagacacagccaatcacctaccacactggaggcattctcgctctctctccctcacactcactcacacgcacactgtgtctgtcagaagcgtattcccatctacatgtggtcctctgttgtccctgctgtcatagacacctggatgctggaagtgagcatttcccacaccttcccactgtatatcaagtggaaaacaggcttttgttcctaagcaaaggcacctggctgctccccatcagcattcctcaccacgagggcctcgctggtaccctcagaccctgccattaatgggggtttctttaaaagtgaagctggagagaggagcttcagcagacagggatcttccagccaaaaggaaggctggaagggagccgctgtgagctaatcccctgcagggctgtccttccaagaaaggaacccagacaacacagaaaaagttcttgagcaattcccaggcggtccagctccacagagccccagggtaggggccgcaggaaaagttccccaaaggcgtcttctcagctgggaggaaggccgtcttctcagctgggaggaaggccgcagtgagctctgttcccactgtgcggcaggaaggtgctgaatagggtggtgtcgcccagctcaagaggtgctgtcttaaaaccctgctctataaagcaagcccagcctgagcctggattagacaggagcttgatattattcaaggacacatttaggccctaatggctttccaatgaaggggtaatttactacccggggggctaaactaccacagggcctgggccataaacgggccttttccccagaccaactcagtccagaatccggcctgtgtcaggggtcaagacaggggcctggtcccatcacacagatggctctccccagaagagccatgaggtcccccaaacacctctccccacaccccctttggtgtgtgtgagttggtggggcggggcgggggggggggagcaggctggggttgccagctgattctgggataagtagggctttatctcaagggagaatctatttcaagccacaatccttctcagaaagaggaggaaatcacagagtccaaacaccatttcaggtgaaatcaggaggttattcatctcccctcagagcagacagaaaggaaaatcaatgttttagagggggaaaaaaggttccatttgaattaatgggtttgtggcttctccattgatctgagcctcttcacactttctttttgtgcttttgtgctcttggggagaggggagggagtagggaatggggaggagggggtgggcctcccataaggaaaaggacggtctaaccttaacctttctacaggaataatgctaattagcgaggcttaatgagaacttcccccaggaagcgcagcccggtaggggcggccggactcgggcaaacgcagctccgggtgggagcagggtcacttctgctcccgagcggctggaataaaaatgcggattgcactcccccctcctccctatccaaagtgtccagccttgaagacaaggtggagggaggagagagagggcggaggtgtaaatccaacttaacccctgcgcgcgccctcgaggcggccggctgcccccgccccgccgtgtcccctcattaaggaaggccccttcgccaggggccgccaacgcccgcggcttccggtcagacggtgcacctgagagggacaccccgtcccctcccgggagggacccgggcctgctgaagtgggctcaactctgcaaaccgcgtctcaactccccgcgccgcgccggggaacccctccctgacactcaacgcttcccgtcctcacatccccaaacacagtccacttcccttctcgtggcggccgcggcaacccgagcccggcccccgccccgccgccagagaacgcctccctcgccgggacgcggtgccgagcccgctgcacaccgagcggccgtggcacaataccgcggcgctgcgcgcacaatcaccgccccccaggacccgcggcgcgcaccccgggagtggggtgcgccccgcgaccctgggcgctcagggccagacacacctcttgggcgccccgcggcccccacagtgcagccttcatcgccccccctccactctcgggcacactcacccgccccccgccccagcccactcggcccagggcgcagccgctcccccgcgccccctccctcagccccggcaaaggaagctccccctgcgcccccctccccagaaccgcccccagcccctcgcccccctaaccgcagctcaacggccggcggcagcagccggagaaggggggcggcggcccgggccccggaaacggcccgatcgccgggatccgggccggactccgtacctgggctggaagcgaggcggagatgggcggtcgggatccgcgagtgagcggggcgggcggcggtgacagccccacagctccagctgctgctgctgctgctgccgccgcggctgcccggggagaggggctggcaccaccgcggcgcgtcactgcccggcccgggggcgggggtggccaggaggagggcccaggcgagcagcggcggcagcggcggcggcgccgcggcccggaggaagggggagggggcaccgggcacggggaggcgggagagggggcgggaccgggcacggggcgggggcgggggggaggggagcgcagggagggcgcaggcagggggagtaggaggagcagcaggaggaggtggcggaggggcgggtgagagggaggagtgggcacggggggaaggggagagaggaaaaggaggcacccagggagaggggagaggagaaaggagggagagaggcgcggggggagaagaggaggaaggagggggagctgggccaggtagggggggataagggcgcgctggacgcgccgccgtgcgcttcggtggggagcgcgctcttaagggggaagcgcttcgaggaagatccttgcacggggctgagcccggaaagaaggcgctgggatctgtgcctacccatcgctcccggaggctgcggtctctgggtccggtgggggctggggggagagggcacccggcgggctgtctgcggtcaggccaggagagggagacttggcccaaataaagtgactcaggcaccctcaggaactctcggcgcccggggccccttcgggcagccttcgacccccatgcgtctttcgggtccccagggacgcgggtacttgtggggcggggctgccgggcctcggggttcggctcccccgggcggccggagcgagaccccgggctgggaaagccaggcacgtggccggctctcggccgtacccccgccccacccccacggcagggcccccagtgcttgatcaagttcaagctcgagctcctcggcgcgctgcccaccggctgcccctccgcgcccctcccccttccccatccgcaccgtctcgctcttcactcttcctttgtctctttcccaccacttagtttacaccccctccgccctcctccccgccccccgcgggcacccgagtgtccgggaggcgctcacctgttcgacccaaacatctacgcgacccccagcgcccgccgcccgcgtgcccgcccccgccccgccgccggtcattgtgctccgccagcccacaccgggccgggtcctgacggcgcgcgagccacagttgtaaagtaataggataatctcggggacgtcgctccagcccagacccgggcacgcactgtccgtggagacggcaccgccggggaggggagccacgcggattccagatgcggtcccccaggcggacagacccttgcccggggcgcaggaggaggcaggactggcatcgcggggtgggagccctggacctccgagcaacctcggactcggcccgaaaagcaacactctcatcaccaaaccgcagaattagaccccgatggagaaaatgggtcaggggatccattcccaccccacccctccaaatccagaccctccgctaccacagatcagcctcgaaaaaagcttgtgcttcaacaaggatggggaactgccctcgtggaattctgtggggaaattgccaaaaaaaaaaaaaaaaaaaaaaaaaaaaacaactaaaaaaaaaccctgataaggatcccacctcctgattcctctggtcgcatccgaagaggaagggcaatttctactgactctttacgctaccattcattcacggtggaaccagcagagaagagaaaacgagacagccacagcgattgtttgcaattttgaaacagactgcctttaaccctccaactttttttctgtaaaaagccttttttctttcttcctctgaaagctttgcattgtgaacaatccatggtaaacaaggctccctctacagccgcgagtgcgaagtacaaccccacaggttcagagcccagcgtttacccgtcagaaaaataaaatgatgacaagacatcacattagcgccacgcaggcttccttccgcacatgctcaagactctgctgtcaatagaaaactcacactttctttttaaaagagggtttaggcacatttactcatttgcaccttttattcctgaaatcaaatgtgttttcaaaccaattcactctccccagtttactggatcttctcatccttggtgatgtggggcaggtgggaggctttatttatccacacatgctggtgcccaataatgatttttagaacgaactagtggccacagctcttaagttcatccaggaaatgtgtttccaaacgcgggaactgtccatcctcactctgaaaatgagataattcagactcaggatttccctttccccaccacattttcagagacctttgacttctcctggcctgaattactatttcacagcagtggtggacatctgagcttgaaatataaagccaaatacaactgaagttcaaaggtggaattgaacccagataacccacctcttctctgactaataaaagagagctagtaccgcccaggagggcagagcagtgattttctgtaggcatgaaacgtgaactcatttactatccctgagataaaacagcccagccctgctcaacccacagaaaacagttgagagccctgcagaaacctggctgttgagcggcactgcaaatgaggtgagttttcatgtgtgtgtgctgaagccctcagaaatctcccagatccttattcctacaggagctgccactcctggagtaaccttgtataggttgttttcagtgtccttgtgccactcccccactccttaaagtggccacagcatgagtcccaatgaggaatcgggtgacctagtttcttgaccactaattctcccagtgatgtgtcccttcttctggccccagcctggtaggagaccatggcagagaaagctgatcccatctgcttcggggggacaatgctgccacaggtcccctccagcctctgaagacattgggtgcttttgtaaacagatgattagggtatgctctgatggggctttttaagcagcaaacccctttctttcatgcagcttcccatatgaagtaagcatgtcccacaagtggggacctggccatgggactctggtttgccattattaggacaaataggatcttagcgtgaccagagcagacactgttcaagcacgtcaaaacattaaaaaaaaaaattatccccacaaatgacttattaatgacagagaagaaaatgtacctgcaatggggcgatctggcagacacttcccaatcaagtcatcaaattcagcagcctccaaagtggggccaccagacatgatgtcctcggctcctgaagggaggcactggaagacacagcatcacttgagccatgtgctcccccaacatgcttcacctgaatctgctcctcaagagacaaccagacaagaaatccagaaagagaaactccacaacacaacagtcttggactctacaaaacattcattgtcactaattgactttctaaacgataagatgaaagagaaataacagccgggtgcagtggctcacacctgtaatcccagcactttgggaggccgaggcgggtggatcacctgaggtcaggggttcgagaccagcctggccaacatggtgaaacccagtctctactaaaaacacaaaattggacgggcgtggtggcacacacctgtaatcccagctactcgggaggctggggtaggagaattgcttgaacccaggaagcagaggttgcagtgagccgagatcataccgttgcactccagcctgggcgacaggagcgaaactccatctcaaaaaaaattaaagagagagaaataacaactaaacttaatgtgtgactcttcttagatcctgtagagatggaatgaggtgtggacaaggggtgggggagaggcagaggatgggggtggaatgagggtgggggccagggtgggctctgggctgagtggtcagggaagagctctcccaggaggaagccactgggtgtcctaatccccagagggcagaagttgacagctgggtgaagacctgggggcactgtcttccaggcagagggaatagttggtgcaaaactgctgatgaaaggaaaggtgaccagagtgctagagcaatgtgggccagggggagggcaggagggatgagcatcgggggggcaaacagggccaagcatgcaacatcctgaacatcccccgtgaggtgtgtgggctttacactgggagtgaggagaggatgcaatctgagttacgtttttagatcaggggagatgagattataaaggagcagaagtgatgacagggaggccagtgaggaggtctaatggaaagagtatcatcagatggaactagttcaaattctggctctgacactagatggatgactttgggcaccatacctaaacctctctaagcaacagtttattcatctacatgtgatccacagtttttgtttgttggttttatttttttttttttttgaccaaatcttgctgtgtcacctaggctggagtgcagtggcacgatctgggctcactgcatcctccacctccctgactcaagccattcttgtgtctcagcctcccaagtagctgggattacaggtgtgtgccaccatgcctggctaatttttgtatttttagtagagatggagttttaccatgttgtccaggctggtctcaagctcctggactcaagtgatccacccgccttggccttccaaagacccactatgtttaacgtgtgtttaacgtagcatttggcaccaaattttcctctttgagattacaaactgtggtagacagtctccaagatggcccatgatgaccctcaccgcccagtttcataccctggtaccatcgcaatgcacagggctgtggaaccaatggtgcattgtggaaatgagggtgtgtgactgccaaggctagatcctaaaagacatcttgatcttttccccagagggagtacttggtagatggtagcttttatcatcaggattgtacatttcataattgcacaatcggggtcacatccctctctctaaatgctacactagtttactctgccaccagcaatatctagcagcactcatttcactgcacacttgtcactgcttactattagcaatctcttttatctctgtcaatctgagggaggaagaacagtgtctcttattttcctttgctcctcttcacttgggaatgtaagtagatgtttctgtgcactgtgtttacggggcacttgtatttctttttctttctttcttttctttctttcttttccttccttccttccttccttccttccttccttccttccttcctttctttctttctttttctttctttctttctttctttttctttctttctttctttctttctttctttctttctttctttctttctttctttctttctttctttcctctctctttctttctttctgactaacctgttcatatcctttgcccatttctctatttgaattgttggtctttttttttttttttttttggtaagaactttttggaaataaggaaaattaatcttttgtcatgtattttgcaaatatgttttccttttgttgtctttttatttagtttatgacaagatttttttagccatatggaaattttacatttttatatcatctgattttttttttttcctttagggctttagggcttcaggttaaaacaaaagcttttttccactctaagattacaaaagtaattcacctatattttcttctggaaactttatgtcttcattacatttaaatctttattccatcttttatttatctcaatataagtaatgaagtggggatctggcttatttttttctaaatggctttctaagtggtgtcaataccatcttttatcttttattttttatttttgaaacagggtctcactctgttacccagactgaagtgcagtggcatgatcttggctcactgcaggctcaatcccctggactcaagcaatcctcctgccttagcctcccaaagtgctggaattacaggcatgtgccactgcacctggcctaaatatcatcttttaaataactcatctttatccactaattggaaatgtcatcttatactaattttctattatgtgtggatttgtattatattctgttgacctattcctgtctcagtattatggctttaaaatatgttttctgggccgggcgcagtggctcacgcctgtaatcccagcactttgggaggccgaggcaggagaatggtgtgaacctgggaggcagagcttgcggttagccgagatcatgccactgcactccagcctgggtgacagagtgagactccctctcaaataaataaataaataaataagtaaataagttttctggcctggcatggtgactcacgcctgtaatcccagcattttgcgaagccgaggtgggcagatcacttcaggtcatgagtttgagaccagcctggccaacatggtaaaaccctgtctctactaaaaatacaaaaattagctgggcgtggtggtgcgtgtctgtagtcctagctactggggaggctgaggcaggagaatcgcttgaacccaggaaggggaggctgcagtaagccgggatcatgccactgcactccagcctgggtgacagagagagactccatctcaaaaaaaaaaaaaaaaatatatatacacatatatatatgtatatacacacattatgtatatatatgttttcctactaggtagggctagcatccatctctaccccataaactgtccctgctcacaccataacaaaaataattgaaacagtgtcacagccaaggggtactctaggtacagcatatttatggagaaaggagagatgtttctcctgggggactggggggtgagagggaaggttcctggaagagatgacatttactgtgaatcaaagaagttgggaggcttgcgacaggtggaaagtagggaggcatccggctggaagaggaggatgtggagaatccagggcttcacaagtgcctggattcaaaacacctgacctgtgggctgggccatagcgctgactatccatttattctttatattaactgatttttgcatagctgcctgcaacctcacagtcagtttgacacctttgctgaaatctaggagaaacagtccaatactatttcctcattcttctctatttagataaattttccattacgaatacaactaactgagcctgacttgttgaaatacattctcctgaaaaccatgataaaaggtaaaaattacaatttcattattctccttttcaaaaagtcttgctttaaaatgtcatcagttaattctggtcatgtcgctctcctattccaaaaccttcaataactcccagtcaccggcggaatcgagttatagctctctctggtctggcgttggaggccccactggcctgctggccttatttccttctgttcctctctgggaactctgtagcagacggactcgccatcttttgtcccctagtcacccatgtgcgacccctccatgcctttgaccacacatgtttttaggcctgtgttccttccacacatatgtacagagccactaccacacaccaggcgccatgacaagtgcaggtgacatggcaatgtacaatacagactcagggttgaccatagggagcctccaggccagcaggggagagagagattaaacaagtgatgtcatgggatcctgatctgcatgctggtcatgggcggtgtattccagtttgtacttgatagtcctgaaacattctaggaaggaagtccccagggtgtgagaaggaagtagcagatctgggagggctccactgaggaggtgacatttaagttgggcactgaaggatgaatgggtgttcatgaggtggaaaggtgcctgggctgtcaacaaagacaccttccacctcagccaaatcaagatccctccacagactgccgcccagctggctctgaactgacgcgtttgtggtactttctgtttcctgcattaacttcattttccgaactgggccattcgctctgagggctgggacaggttcttagaagagttaccctgcacacagtagggatgcatcactgcctcactcgggccccttcctgcccactgccagcacagctctgaagtcttcgatagagctcagaatgaagcgggccatcctggacacgggccacactttgtaactcccatggggcatgcacatgcctcttttccctcccttctttcctggtgcccttggagaggctcagagaaactaccaaggccagccacaaccctgcatttctacttgcaggtgtgtacacaataaaatgaacacagatgttccctaaagaacacacagtaggctgggcatggtggctcacacccataatcccagcactttgggaggctgaggtgggaggatcacttgaagtctggagttcgagataagcctgggcaacatagcaagaccctgtctctgcaaaaagaatttagctgtgcatgatggcatgcacccgtagtcccagctactgtggaggctgaggtgggaggattgcttgagcctgggagatcaaggctgcagtgagctgtgattgtgccactgcattctagcctgggccacagagcatgaccctgtctcgaaagacagaaagaagaaagaacacatagcagactggtaggctggtcatagcagcactattcacaacagctcccaactgtccaccaatgaaggatggatacattgtgggccccccataccatgaaatattactcagccataaaaagaaacaaactactgacgcatgccataacacagatgatgctcacacacttatgcttgtgagcaaacgagcacatgctgtacaattccatttctataaagttctagaacaggcaaaatcaatgtatgctcctagaagtcaggtcagtggtcaccctggcccaggggcagtgactagagggagcacaaagggtctttagggtggtgctgatgttttgtttcttgatctggacatgggtcacaggaggtggggtcagtttgtgaacttggctgagctgtgaaactgagtgatgcgtgctcttttctgaatgtgcattatgcttcagtagaagtttcaaaaggggaaacagcaagccaggtcagcttccatggctaagcagcctggagctcgctgtagtcgattactgcaacccactggacaccaggcacctgtgctgggcagtgtgtatgtgttatcttatttaatccaccaaataacaaggttgatattcatttgccattgtgcacatgaagactaggggcttctgggagaagattaagtgactcacccagtcacccaagagtggagaaactggcactcagagagcaggtgacacgtccacaatcatggagctagaagctgctggctgtgctggaccaagatgtgtgggtctccagggtgtgtggtgggccctgctaaggtgagaccactgagccaggccacgtggtgctgcgcttcaccgacctccagcagagcaggaggaatccaccagtgcgagtcagatgcagccagagatttcccttgggccaagacctgggaatgggctaggactgctgtgaggccctgccttgggatggaccccagggcttctccatacaagccttggaaggaggctggccttggaagcctgaagggatgaaactctagctggctctccggcaggtgaggagaggtaaggaccctccacaggctgtgggggtgtgagactaacttacgttcactcggtccaaggaagccatgcagggaaacgggcaggttaccaagagaaagaggcaggcagcaccttctgcctaggcctgcagtcccttcatgacagagcccacagctccggtgtggatgatggcccaaggctctggggcccgggatgctgcatggggacctttctggggctgaatctagtgtgtggggtcatgtccaggtgtggaggggagtgggcagctgcggacacgctctgtttgcactcaggcccttgctcggtgtgacctcaggcaggtgacttgactctccaagccttggtttcctcatctctaaaatgaggaaacaacagcagggacttgtttttgaaggttgcagtgaggcctaaatgcagcgatagctgaagaggcctggactggtgctgggcacagagcaccgcccgaaccatagttatggatagtgatggtactacgaaaactaagtaataactcagtcatcagtccacacgcatttattgagcccctactatgctccaaggcccggtccaggtgcagggactgcagtggtgagataagcacacctgggtctgtccatgtggagccgatggtgctggtgctgctgcggcctcagcttgtccctaccctgactgttgctttctttttcctttctctttccccaccccttcccttgagaaataacagcattaagattggagagactagggctctctttcttactaattctgtgacttcagacaaattactggctaggcgcagtggctcatgcctataatcccagcactttgggaggccaaggcaggtggatcacctgaggtcaggagttcaagaccagtctgaccaacatggtgaaacctggtctctactaaaaatacaaaaattagctgggtgtggtggcacatgcctgtaatcctagctacttgggaggctgagacaggagaatcatttgaacccaggaggtggagcttgcagtgagctgagatcatgccactgcactccagcctgggccacagagtgagataatctcgggaaaaaaaaaaaaaaaaaaaaaaaaaaaaacacacaacacacacacacacacaaacaaattacttaagctctctaaagccgagcctcagtttccctgtgtgctgaggaactgagttctgtgtctgggggtacccagcacacagaaggcccccaacaattgctgttcctgctcccctgcctacctccctctcctctcttcttcctccccactttccccgtttcctttcttttccattctttttctctgcccaagccttcggcatcttaacacccaaagtgattgtcaaagtttagttgatggtgcccaggctgtggcagagactgtgaaccagttttcttgatattatgccctgaatcaacattctcccttatctttttcaaccacagagggtagaaacatgaaattctttctttcccagcctcccttacaactgggaaccacgtgacccttttgcagcaatgagacatcaacacaatgcctcgaatgtggacaaggttggagcaatagcaggcaacttgcaaccatgaggaaaagcctcaataacatcacagagacaccaacccaacattgcaaatggcaccagcggcggctcctccattcttcttgttttaggagtaaaataacttcatgttttgctatagtcaactgggtttgggggcctgtagtcaaaagcattcctggcttattcacatggctcctgtccgcgggtggactagatggcaaggatcccccactcccatgtggccttttctctttcaagaggacacaggagcctcttgactctttgaagaggacacaggggtgctacgctacgtccaggcacctgctgtgcgtactgtggtgcctggggagcagacaagcatttagttccctcacttgtggactctgaaggagggaaaactgtcacggctgcagcacaagtgtgcctgggcacttcctcagccacaggagtatcccagttaaagaacatcttctgtttctatcttatctcttgaggtatttagagccattctaaatgccagagccttagaatgaccatggggctggcagggcatgggctctgtgactcatatctgtcgaggaggctgcttgtggttgtgctggatcgagcccctctccttgactatcttcggcaccgcaagccaaagctcagggctgcccgggcctattcctgaggtggtgcaggagaggcagatgggctgctggggacgaaaggggtaggtaggcgggctctgggctccgtgcccagcattgccagcaacatgcctgtctgctgctgacccctgacccactcaacttcctccccagaagacagtcccttgaagaaaggggttcctccatcaaaatgtaaaatttgaaagccacagatgtctgacccaaacctgctgatctagtaacagggaagctgcagcatgaagaagttagatggctggggcgcagtggctcacgtcccagcactttggggaggctgaggtgggggaatgcttaagcccaggagttcaagaccagcctgggcaacatggcgagaccccatccctacaaaaaatacaaacattagctgggcgcggtgttgagcacctgtggtcccagctactcaggaggctgaggtgggagaattgcttgagctcaggaggtcaaggctgcagtgagctgtgatcatatcactgcaccccaataaaagaagttagatgactcgtggggcagaggcacacctagaaccagagtcgctggactccctctcaggtgctcatctccactttcgacctgagacaggcccaggtccctgccctgcttccctctggcagagaaagatcaccactaggcttcacatcacaacacatgtgcacccggctggcaggccctgggagagctgcctttgaagacggctcccaggcatagctcccccttactcctctatctgagccccactgctgttcctaccccagggtctttgcatgtgctgtctcctgtgcctggaaagccctcccacttcatctctgcagggctggccacttctcaccattcaggccttggctcggatgctgcctcttcagagaggccttcttgccctgaggcacagtctgtcatcttactctattttaattatctaccccaaatttcctccttttgcatatttttttatattgccttgtttatcatctccaggcctgtgagctcctagggatgggtaccttatctgtctcattcactgtggtatcttccgtgcttggaatgacctccagcatgtagtaggaacctcggaaatgatttttgagtgaaggaaggaagaaatttctttctttcttttttttttttgagagagtttcactcttgttgcccaagctggagtacagtggcatgatctcagctcactgcaacctctgcctcccaggttcaagtgattcttctgcctcagcctcccgagtagctggaactacaggtgcctgccaccacagctggctaattttttgtatttttagtagagacagggtttcatcatgttggccgggctggtctcgaactgacctcaggtgatccacccgcctcagcctcccaaaaagtgctgggattacaggcatgaaccaccacacctggcctaggaaatttctttaaaactacataatgctgtgttgcagggaggacaagggtctggtcggccgtgagcagcagctgtgctgtgtgcctctcagtctgaataggggtcggggagctacccgcctgccgggatccacacccagtcaccccgagcaaaacaaagcagacagcacaaattcacaaagcaatactgtgccctcctaccctcaaaaaaaaaaaaaaaaaaaaagcccgataatgaggtaaacacaatcatgaccaggaaaaagcttggccatgcttcttccagtccacccaaagccattatctctaattgatctccagacatcagctgctgaagcgtctgaaaccctcctgcaccctccaggtctggttacaaagccctggcccacccacccgccccatggagtcaggtctcctggagctgctctttgctgggggtgacagggcctatctgggccccacatgaaaaggacccatcaggctgacaagagtcagggtgggtcaagaacctgtgtaaaagtcacaaccactaaatgctcagctgccagggggctgagctgcctgagtttcagtgccttaagtagaaggcttgacaaagccatcaggggtcccgcattcaaaataaaaagcaaggaaaaccagggacggctgcagaaaagcaccctgcccaaaatatcccactagttctgggtgaaagaggcacccaaaagctggagtgaggagtttagttgcaaaacggaacgggacttagccacaagatcacgaatcccttctgggtcttggttaggctgtggcggtcacaagggcagccatcagtacagggaccatctggatgttttgagctgctccttcctggcccagcccaggaaagacgtctcctttcctgttaggtctctcttgtccttagaaacagaccggagtcagctccctgggctgcctggcaggggtgttttactgccagagctctgacaggacagagccacttccccccttcattcatggacgcccaggtagcagctcctgacctgtgcaagcttttcccttgacacacacaaagcgtcccgaggccagccctgcatgcagtattgctgcttatggcaccaggcagctctcctgcttgcaccagtaaattacgagtgcttcctgcattttttcccccagataataaagttgaaaggccaccttggcattctcgcatttgtaggggtggaggtctgcagcccggaaggggctcgagcctcaaggagctgctggggacaatgagctgttcaggttcggggtatctgccaaccccaccagacactggctctccagacagggtggtggctgttttccactttcccacacagcttcagggaagtgagaggaaagaaaagacacagacctctcccagctcaggttgccctcacaaaacagaggaaatgctcattttctgtgagaatttggaaattgtagtaagtttctagaaagcaccccaggatgttcaagaacatatactgattgcaaaaataatgtcccataacaaaagatgtttgacaatgagcttttcacgcctctctctgttctcttaaaaaaaaaaaaagctttctgataaatcattccctctcaagtttagaaatgccctattttcacagggcatggtggctcatgcctgtcattccagcactttaggaggccaaagtgggaggatcgcttgagcccaggagttcaagaccagcctgggcaacacgtgaagccccatctctataaaaagtgcaaaaaattagccaggtgtggtggtgtgtgcctgtagttccagctactcgggaggctgaggtgggaggatcactagagcctgggaagtcgaggctgcattgagctgtgattgcaccactgcactctaccctgggcaacgggagtgagaccctgtctcaataaaaaaaaaaaaaaaaaaaaagaaatgcactattttctttgggaggcccagaagttcaagatcagcctgggcaacaaagtgaagcactgtttctacttaaaaaatttttgtgtttgtttgtttttgaggcagagtcttggtcttgctctgttgcctaggctggagtgcagtggtgcaatctcagctcactgcaacctctgcttcccaggttcaagtgattctcctgcctcaacctcctgagtacctgggattacaggctcctgccaccacgccagctaatttttgtatttttagtagagacggggcttcaccatgttggtcaggctggtctcaaactcctggccttgtgatctgcccaccttggcctcccaaagtgctgggattacaggcgtgagccactgctcctggccaaaaaaaatttttttttaaataaatgccctattttgcatgataccattttaggaggatggggaatgctgtgctgtccatgtttagagccccccgatcctgacactgggctcatggtgctcctggttctcagtccacctctgtttgtcagtgaacaaagaggcctgggataaagtgtcttcacataatgctcatgtggtcagatcagtggtgctgctgcagtatttttcctccaccaaaaagcggatacaaacatttttaggcattaaagaaacaatttttggctgggtgtggtggctcatgcctgtaatcccagcactttgggaggctgaggcaggcagatcacttgaggccaggagtttcagaccagcttggccaacatggtgaaaccccatctctactaaaaatgcaaaaattagccgggcatggtggcaggcatctgtagtcccagctactcagtcagctgaggcaggagaattgcttgaacctgggcagcggaggttgtagtgagccaagattttgcgactgcactctagcctgggcaacagagggagaccttgtctcaaaaaaaaaaaaaaaaaaaaaaggaacaattatttttttcaaagtaatgccttttttcaagccagcaaaacttttaaaaagaaagccaacaaaagaggaacaattcctactagatattaaaacatatgataaagttttcacacttaaaacagtttggtagctgctacatgaatagtcaaggagcccagtggaccaaacagaagtagattctgttttggatggaaacttagtaagttttaaaggtgtcatctcaaatcagtgggggaaaatggagtatttaacaaatgatgctgagacaaaagggttaagcggaatctgtatctcagaatacgtcagcataagctccaaatggatcaaagattaaatataaaaaatgaaaataaaaacatgtatgctttttgctctgtcagctggaagagcctgcaagaaaggatacttcagtaccaatgggcacacatagtgcccagatcttgtttttttgttttgttttatacaaaatatatagagatgaggtttgcccaggctggtcttgaactcctgaactcaagagacccttctgccttggcctcccaaagtgttgggataatgggtgtaagccaccatgcccagccagatttttttttttttttttttgagacggagtcttgctttcttgcccaggctggagtgcagtggcacaatctcggctcattgcaagctccgcctcccgggttcatgccattcttctgcctcagcctcccaagtagctgggagtacaggcgcctgccaccacgcccagctaatttttttgtatttctttcttttttttttttttttttactagagacatggtttcatcgtgttagccaggatggtctcgatccgatattttggtttttaatatggttttccaataaaaggaatcagagctccttggagaaatcactgattccaggattggggcaggaaatatgcaagatgagcctggagtcttacagtgccagaaagcaaagaagcactaaaaaacaagaaacgaacaaacaaaaaccccaaacaccaatgaggtatggcaaaagagcacaggaaacaactgaaaaagctccaatggccaaagctagaacaatttgtacaacaaaatgaagaagtattgaatgatcatcaaagcataaaataaacagctatgagtctcgacttctataaatggctgaataaattaataagtgggggaggagaaacaaatctcctatgcataagcaatctaaataatttacgttgataattcaccctaaaaaaggcagaacatgactccccactcttcaggtgtgggctgcacacggtgccttccttcccaagtgcacagtgtggaaagagggaaaagtcacttgacaggagagaaacctgacaaccaatatctcaaccaggtgtgatcaaggccaatggcaacagtcctaaatcatgttgatattatggacccttaacaggatgtgatgaaaatgacactccatgtctgtggtcttcctcctaataacccataaccccggttttatatagagaaaaatgtcaaatttctaaatcctacaaaatacacaactagtactcttcgaaactgtcaaggttatcaaaaacaaggaaagtctgagaaactgtcaaagcccaaagaagactaaagggacatgacaattaaatggaattaaatgttacaatgaaaattaaatgttgtatcctggatgaaatcttggaacagaaaaggaaattaggtaaaagctaaaggaatctaaataaactgtagactttacttacaataatgtatcagtgtggttcattagtggtaacaaatgtatcaccttaatataagacattgataatacgggaaactgtgtgtcgaggagtgggcaatgtggatactctgtactatcttcccaatttttctgtaaagttaaaactgttctcaaaaatagtctatcaaaaaaaaaatgaaaacataaaaatactaaaagaaaacatgggggatggagtggagttagcctttttaagactcaaatgcagaagcgatttgaagaaaaaattgatacatctgagtacataaaaataaaaatgacaacacacacagcataggcaatatcaaaagagagagagctacggatggggaaaaggaggcaatgactaactctggggaatccgaagaaaggaaatgtaaggaaatgtaatcatagcatatgttaattgggtcagctatgagtaatatgcacacagtcataataatataaacaatgaatagcaatttatctaaatagagaggtatagatatgttgcaggatggaggaaggagaaataataagtgtatttatgagagggtgtaagagtgcaaatacttatttcctacagcaagaaattaacaacaacaaaagccccaattgaaaaatcaagaacttatagtataagcaggttattccaaaataggagttaaataccagaagagacagctaaaacataagaaagaaaagaggctgtccctagggagtagaaattgaagtggggaggctggggcagggtctgctatttttctatatgattttaaaaaatgtattctagaggccgggtgtggtggctcatgcctgtaatcccagcactttgggaggccgaggcaggcggatcacctgaggtcaggagttcaagatcagcctggccaacagggtgaaaccccgtctctactgaaagtacaaaaattagctgggtttggtggcaggcgcctgtaattccagttactcaggaggctgaggcaagagaaatgcctgaatccgggaggcggaggctgcagtgaggatcacgccactacactccagcctaggtgacggtgagactccatctcaaaaaaaaaaagtattctatctataaaaataaaaataatgcaggccgggtgtggtggctcacccctgtaatcccagcactttgggaagccgaggcgggtggatcacctgaggtcaggagttcgagaccagcctggccaacatggtgaaaccccgtctctactaaaaatacaaaaattagccgggagtggtggccggggcctgtaatcccagctactcgggaggctgaggcaggagaatctcttgaacttgagagcagaggttgcaacgagccgagatcacatcattgcactccagcctgggcagcaagagcaaaactccatctcaaaataaaaaataaacataaaaaataaataaatgcaaagaaatcaaaacaagttaaaaaagggtaaagggccacccagaagtgatttctgtaggtgagctgccctgggattgcggtggaaggtctgggggcacaaggtagaagctcacagcggcttctccaactgtatgtcctctcacagcagaaatgctccaaggattgtcctctgcctagagaaatcccaacagcagccttggtcaaggacagtatttcagctgcttttgttttcttgctgcagcataaaccttccacagggccagaaatttactgagacaggatgaaggtttgggctatagattctcagatactgaaaatgtggtcgatggcatttcaggcctttcccgtgctctcatggtggcaggttaggcccctgcagctcagctacacaacaagaggaggtaatagatggagcaaaggaaagaagccagaagcggacaagcaaggctgggagtagtgaagacagttggtgggatgggtagaagctcgggaggctgggaactgagagggaagtggtggcctcagtgggagagccccatggggagagaatgaggcagactaaaatctaggcagccaaagcagcagaccccatatcctcacaaatgccacagggtctaccccacttattggtccatgcacattttcaggagcagacacagatgctcaaagtttgaacagtctagagaaatggctattccaagacagtagcaaaatctgcaaatggtgaaaagagagtggagacggcaaagatatgctgagagctagaaagattctgcctcttacagcaaagcttaacagccctcctcacctccccaatggcagacctccaaggtctggagtgtcactgggaaactgtctttgatcatcataaaatatcacactttgccctacttaatgctttttttttgccttgaacatttatttaacattaatagcactactccctcttttttaattttcctttttgtgtcattttgataaatgtcttttgtaaatacccaatgccatttaagaaggcccatctgagctttttatgatactgtgtaatgaaatttaacccattcacattttttatatttagtagtttggtgttgtttgtattatgttactttatgtaatttattatatacatttatcatattcctttatatttattttatatgtatacataaatctcttttttgtggtttcttcgtttagtccccatgtaatcactcttgctggactgattaagttttctgtgtttcttttattcactctactggtttagaagttctacattctatttctagtccatggagattactctttaactttaaagaaacatctcagaggccgggcgtggtggctcacgcctgtaatcccagcactttgggaggctgaggtgggtagatcacgaggtcagtagatcgagaccatcctggctaacacagtgaaaccctgtctctaataaaaatacaaaaaattagccaggtgtcatggcgggcgcctgtagtcccagctactcgggaggctgaggcaggagaatggtgtgtacccaggagatggagcttgcagtgagccaagatcgtgccactgcactccagcctgggtgacagagtgagactccatcaaaaaaaaaaaaagaaagaaagaaagaaaaaaacatctcaaaacctctgcagctgcttttttttttttgactgagtcttgctctgtcgccaggctggagtgaagtggcatgatctctgctcactgcaacctctgcctcccaggttcaagtgattctcctgcctcagcctctgagtagctgggactacaagcacgtgccaccatgcccagctaatttttgtatttttagaaatggagtttcctcatgttggccaggatggtctcgatctcttgaccttgtgatacactcgcttcagcctcccaaagtgctgggattacaggcgtgagccactgcaccggccacctctgcttctttaagagaccatcaaaggtcacacacattgagccacagcaggagacaaggccatgtttccattctgctattactcctctgaactcccagttcacctgggctgcagggcagcctgaggaaggaaagaagggaatcatcactgctatcaggctcctaaacatggagcctaagtcagttagacttaaacaggttgtctaagtcagtactcttgggttctccatggtaagaaccccatgagtcagcactgtttgagtaagtgacagtctctcacagtaacccattaacactccttctcctttgtgtctgcccatattttgggggtctttctgggcaggggggagattgagagggttcataagaaagagaaaagataatgattaaaaagtaaatgtagttagccaaaaaagtggaaacaacccaaatgtccatgaacagataaatgcagtaaacaaaatgtggttaatacaaatacaataaacaaaatgtatggttaatacaatgaaatattattgtcataaaaaggaataaagttggtcaggcgcaatagcacacatgcctgtaatcccagcactttgggaggctgagatgggcagatcgcttgagttccagaccagcccagacaacatggcgaaaccacatctctacaaaaaaaaatacaaaaattagctagatgtggtggtgctcacctgtggtctcagatactcaggaggctgaggtgggcagattgagcccgggagggcaaggctgcagtgaactgtgatcgtgtcactgcactccagcctgggtgacagagtgagaccctgtctcaaaaaactaacaaaaaggaataaagttctgacacatgctaccacatggatgaaccttgaagacatgatgcacaaaaggacaaaaggacatctgattccactgacatgaggtgcctaaaagagccaactgcacagagagaaagcagaatagaggttaccagggctgggggaggggaggaaggggaattattgcttaatgggtacagagtttctgtttcgggtgatgaaaaaattttggaaatagatagttggtgatggttgtgcaacattgtgaatatactcaatgccactcaattatatacttaaacgtggttaaaatggcacattttaggttttatatatttatcacagttttcttaaaaaaatgaatgtggagagtttttcagggtgggcttgtttccttctccatttagggggatggaagcctgagaaagttcctgctggaaatctgaaccttgatccctagtgctgactgaggaagcgctctctcctgggcctggcttccaaggagggggcttcctcggagtcctggcctccttctcctctgttccccaaactggctccagcctcccctggccccaggtcctgctccagctgttacctctcagcttccctcacccaggccctctctgcttgcccaagccaggcattttaaaaataagccaggcccggcacggtggctcacacttgtaatcccagcactttgggaggccgaggagggcggatcacctgaggtcaggagttcaagaccagcctgaccaacatggagaaaccccatctctactaaaaatacaaaattagccgggcgtggtggtgcgtgcctgtaatctcagctattcaggaggctgaggcaggagcaccgcttgaacccaggaggcagaggttgcagtgagccgagatcgcgccattgcactccagcctgggcaacaagagcaaaactccatctccaaataaataaataaataagccagtgcctctgaacttcctggcactagccccttctgttttctgtcccaggtgacagctctgtggctgctgttttgtcccctctactaagaagagctcactgtctgtgaaggggtctgctcctcctcacctgccctccaggacccaaggaaaattctgggccaggacagaacagtagaggagagggaggcagaggttaatgggggcaagctagaacctccatcacgtgggctcagacaatggagctgcaccacttcacacactgctgtgaggaccattaaaaccattagcgggacattagctctgctccaggaactgcagagagggaggcaagggaggtgcccacagtcctccagaggtgagccctgagcctctctgggcctcggcttcctctgggtgggagaaggagcacagttgtctctctgcttccacagctaatttctacaaggggcctgaaatcttccttccctgccccttccaagaagatggctcagtcctctgtgcaactaaatacaatttccattttatatctttttaagagtattcccaaataaaaaaactctttgatcagaccacactccactattttctgctcagtgtggccactttgatgacagctcttggggtctgtgtcttaggctggaggtgccgagagggtggagtctaacccccatagcggtgccttgtacattgaggacactataaatattgggtgcactgaaccagacttcaagaagaatctttcttctttctgtgaatcttgttattgaattttcatattatctaataccctctgcagagaaggactcattttctagcatattaatctgatacaactggcctacaagtaacatgattctgtccagccctcaagaaaatcccaccacctgcattttgatcaaagcaaagtgagggaaaatgttctccttatcttaccatttgtctcttggatacgtgatgttggaaataaacagattattgagattttttcttacccaaagttttcagatatagagctttgttcagcattaataaaatatttatcctggccgggcacagtggctcatgcctgtaatcccagcactttgggaggctaaggcaggtggatcatgaggtcaggagttcgagatcagcctggccaacagagtgaaccatgtctctactaaaaatacaaaaaaaaagtagccaggcctagtggcggcctcctgtaatcccagctactcgggaggtagaggcaggagaaatgctcgaacctgggaagtggaggttgcagtgagccgagatcgcaccactgcattccagccagggtgacggtgtgagactacatctcaaaataaataaataaaataaaataaaacaaaatatttatcctggttaccggttactttagaattggatttattttccatgtaacctgcattagaaatttgcaaacactacagatgtcctcttttggcattttgtggtcagagtgatgaaatgaaaccactctcaaagccttgtcttgggacatcggatttgacagcagccgaacctgtcctgcggctgtgtttggatggtggggagtcattcgcccaccctggcctgcctttgctgcacaggaaataagctagtaattcaagtatatgtatttttagttctaactcaagctgaagaatcaaagactgctgggtccttggcccttccttgatgctgcagataaataatctggtgagccatgtgatttcatcttgcgccacgtgcccagccataaaacagggataacggcactgcctaagaggctgaggccttgagagctcattgctttgcatggagtgctgaagactgacagatgaagggctctaggcatgaggcgggaggctgcttcacctgccaggtggtgaaaggcaggcctgaacttccatctcctgccgcactcagaagaagctggctacattcagaggcccccacctggaaactactaatgaagctgaggaagtcacatccagccccactgtaagcagaggccacctcgatcttggccctgccccagctggactcccagaacaccctggagacaaatgccctccacagtcctttcttcctttgggagctaccagagcctcaccagggcaattcctgcatctcaggtcatgaacttcggttcatcccctgatactcatcaggtgcttatgcacacaacactgtgctttcccccttttgcttcggcaacagaactcctcacattctctgctgcagccacaccagcccctcaaatctcttgaaggcttggtcctcccttgagccacaaggcctttgcataagctgttcccttggcctggaactctcttcccctcagattccactctcagctgaagctccctttctgaggcacagcttccctgacccctgcctcagtccaccctccaagcccaccctaagtacccccagtgccacgtgtccttctgcaccatggcaatgccccactgatcacttcctccattgtttatcactgcctgctgtgagctgggcatttgtgtgggatcctctggctggtgtctgtctcccctagatcagaagaaaatacagggatgccagccggaatctcagcactttgggaggcctaggcaggcagattgcttgagcccaggagttcgagaccagcctggccaacatgaggaaaccctgtctctacaaaaaatacaaaaaattagcaggtgtggtggcaggtgcctgtaaccccagctactcgggaggctgaggcaggagaatcacttgaacccaggaggcagaagctacagtgagccgagattgggccactgcactccagcctgggtggcagagtgagactctgcctcaaaaaaaaaaaaaaaaaaaaaaagaaaagaaagaaaatctaggggtactgctgtttctgtaaatcctcagagcctggctcacagaacagagctccataaatatttgtggaatgactgaatcctcgttaaagcacctaacccatagtcttaactcccctccttccattgacgcaagtgaagatacagttaggatttttaaccagatcaaatatctgatttgttagtgagagatcgcaacttgcacgacactgaccactactggttctagtggtgacctggatttagtgccattctgtatgaaacaaaaccagggggctgtgcttccggctgtttgtgcggttttgtgcttcattcttcatgggcacagatgagcacggtgataacagtgtttacgaagccaggtgccggagacagtgaggatggctacaggaaagaaaggccacagattgctcttcagtggcagtgagaggagacctaatgcagaggctgcacagtggtgctgggattctataaccaacaacaaaagcaacaccctcattaccgacactcctgcagctcaaactactttgcctttgtgcgttggaaacccaacccaagcccattttccccactggaattatttgtgatgatgtgaagtttttggagatgcaaccatcccagaacaggcacgctcagatgagaagacgtgggagacacagttctagcaaacagttctaccgctcagagcaaagcctacgtcacacagcctctagggtctgggcacagtgtggggacaggagggctggccgccctgcctcttgaaaggaatacgcagctctgcaggttcaagccacccagctgaagtcctcaaactgggtaacacgggccaagatgccacctgcacgtgtcctgctacatcaccatggatctggccaaggagccaccaccccctcggagcacgcatgctggggttgtcaaggagaccagtgcacaggacggccgcacccagggctggagaccggcagcgcaggacagctgcatccagggctggaagacagactcgagttctgacccatctttcaatgggagagaaagaatccaatcccctgctagggccacaaggacatgatgggtttggatgccataagagatgagaacactccaagctgaaggcaagaagtgattaccctggttttaggcagtggttggggggtggaggtggaggggaactcacctagtccttctttgaaagacagtcaggctacgtgctttgcaaagggttaggaggtggactgtgtgggaaggcaggcgagagggagtttcttttcatagcctgtttccatggtgtctcacggcccttggcaaaccccagctggggaggcttggacggccaggaggccccaggtccaccctccaaggactatcccctagtcctctgggccccaagagtgacagaggccacaggcaggcggctactctctcttgcctccctgggggaaggtggcaagaggccagcgataaagggcagagcagagaaagaacaactccaggggccagggctgcggctccctcccttccacgtcccctcctccccctcctcccacgagcccacccaaggggaaagttttctccctgaagacctgcagggctgtctgcacaggagaccctctcacgagaaacacattcttgcctcccgcctctccgcctggacaacccagataaccagataagggcctctttgatttcccgtgtgtttacacaagctgtggccccaagtcttggaaagaatcaaccaccgccaggcaagtcaggacgcctccaggtggggtgaggggagacggccgccttacctgctcctgggaattcatcactcgaagcttcatctgcttcaggtaggtggaggtgaggggcatgttgtaatcaataatcccagagaccagtggagatggaggctcgttttctggcagaaagaacaaaaggaaagccctttcagtctgtgctgcgggcctgttgcccacatggagcatttaacagagcccgtggaagaggaagccaccttggaggagaagggacaggtcagaggtcgcagactctgtggctcacccacatctggcccagagatgtggactgcatggtgtcaaaaatattttttttttattaaatgccagtgttctatttagagatttcacacgttaaaaaacaatgaggccgggcgtgctggctcatgcctgtaattccagcactttgggaggccaaggcaggaggatcccttgagccccaggaggggacacaggccccaggagttcgagaccagcctgggcaacacagggagatctcgtctttacaaataataaaataaattagccagacgtggtggtgtgtgcctgtagtcctagctacataggaggctgaagtgggaggatcgcttgaggccaggtggtcaaggctgcagtctgcagtgagctgtgatggcaccactgcactccagcctcagcaacagagtgagaatctatctctaaaaaacaaacaaaaaaacccagcaaacccacccccacaacacacacacacgtttataggaatttttggcttctttgaagaacataaggtctggccacatggggcccccactcccgaaggcaagcaaccactgccacttcagcagccacttcttttagacagggtgtgtggctcccattttgccacagtccccaccactccttatcatattgcacagctttgctcatttgcaagtatcaattatgatacttgccagacccttgaaggcatctgtgtttccaaccactgtctaagtcagttatcttccaggtgaacacatgccactctcacctcacccaatcccgccaccccatagcatcccccaaaaacatcctcaggtgccttatgcctcccaggtctgagccaggccttcagtagcccccaaattctggttcctccttcatcatatgcagaggaacattctcctcccatttattcctttgttgtcctgaagatcaaagtgatgcatgttctttttgcagagaatttgcaaagtacagaaagatgtaaagaaaaaatttaaaaaccataattgcaccacgcagcttggcatatgcttctgtttattttttccctgtgatttttcttttttacacatgatctcataatgcatacagagaattccagtctgcttttaaaaagtttttttttccttaacattttgtcataggtattttccccaacatcaagaatcttattttgctttgtaagtagaatttttatggccatgtaatattttaccataatttgcttaagtcattctctaacgattggctatttaggttgttcccattggggctattataaacaacactgcaggggacatctttgtgcataaatattgctccgtatttctgatcttatttcttgcctttttggaacagattacaagaaattaaaaggtagggacataatttgataaccattaaaatctctgaccaagctgctgtaggaattgtttcaattacttgttacctggcctcctcctccttcttccaaggacttcaggccagattcattttgccccagccttttaatcaaaaggtgcccctggtacatagtcccactgatgggctgggatttccatagcgtgaggaaaagtgggagcaacttccagaccaagtgccctctaccatcacaaggaggcccaagagacaggctgcagggtgacagggccgaggtccaggaggaccagaggatatccgggggtgacttataatacctgcccctcaagagccatagcccaaaagggtccctgcaaccttgaaaacgcgataccaagggcaagaagccagacataaaacgacaaccactgtatgattctacttacacgaaatacttagaataggcaaattcaaagagacagaaagtaactcgaggttactggggactggtggctgagggaatgggacgttattgcttaatgggtacagagtttctgtttagggtgatgaaaaagttttggaaatagatagtggtgatgattgctcaacagtgtgaatataatatctttaaaatggaacgattaagccgggcacggtggctcacgcatgtaatcccagcactttgggaggcagaggcaggaggactgcttgaccccaggagttcaaggccagcctgggaaacatagtgagtccctcgtctctactaaaaggtaaaaatgttagctgggtgtggtggcacgtgcctgaagtcccagctactcgggaggctgaggtgggaggatcacctgagcccaggacgttgaggcagcactgcgatccagcctgggtgacagagactgtgtctcaacaacaacaacagaaacaaacaaacaaaattattaaaaaggcaagtttttgtgctgtaaatgttttaccataatttaaaaaggaaaaaaagtctgccaacaagcggtgaagttacccaaagaggacaagggaagttcctgcttggcaaggataggaacagccctgcagaaaaggtggggacccggaatagctggggcctagaggatgggggtcctctttgacgctgtgtacttctggtgactttatagatcaaataacattttgaataaagttttacaggaatgcagaacttagttttgctctttaaagctaccctgtcacatatagaatgtttcattctttgttctttgaggaagaagtagacgtcggctgggtgtggtggctcacacctgtaatcccagcacttagggaggctgaggcaggcggatcacccgaggtcaggagttgggagaccagcctgaccaacatgacaaacccccactctcctaaaaattcaagaattagctgggcatggtggcgcatgcctgtaatcccagctacttcagaggctgaggcaggagaatcactggaacccgggaggtggaggttgcagtgagccaaggtcatgtcattgcactccagcctggtgacagagcaagactccgtcccaaggaaaaaaaaaaagtaaatgtcactaatggaatggctaagaaactggcctgaaaggaaccaccccctcctcctcctttttttaagagagacttctgcttggttgggtggcagggatcctctgcaccgataccaaactcaaatgggtttccaccccaccgtcaacctagatttgactttcttaacctcagtggggttttaaaccctagccccatacattgaccgggtcggatgccacatgtcaggcaggcagtctagtgatgacactgagatggtatcgctcagaagagccgtgggtcctgttttcagaggtggatgtttggactgagaattctgccatttctgtttcctctaagaggaggctgtctggtgagaagctgttaagcaccatggtgagtgtgacatcatggtgagtgtgaagggcgcccagcactctcgcggccccggtcggcccttcgttgggtgttgcagggattgtctaggtttgggaggcacggaggcggggagctgtgttcttctactgatggtcgcccctgtcctgactgcagtgtcatgactgttcatgagaaagtatctttaataaagctagtgacagtgtggcttaggaaaaataaaacagtggccaggacagcacccttgggaggcgtgagaagaggtcttccttggcctgttcccaccccagtgtctccagagatgagaaaccacttcccgtgcctgcaggtaagccaagagagctcagaagaggaaggcaggatgtcctggtcttggggaagctggaacatcccgagcagacccctaaacccatcggagaacaccttacattgctgtaaggtgaaatgcttgattttgcagttccagaatgagagttctgtgggggagggaggacctccgcagggaggggacattctaggtgaggaaatgagccatggagccatgggtgggaggtcagagctcaaccacaccagggtgaggagaaaagcaggcaagcttttcagcagtgaggagccccaggtgttctggattcaataagtgggtgcacactgagaggatgggcttagtgggaaagagacggagcaggggccagtggaagccgcagagtcagatgctcaccagtgagaaaaacgccaggatgggggacaaggtcaggtggaaacgtgaacaaggaagaagtgggttccttggactctgagacacgccgcccccctccctgcccatggtcaacatgtggtgccacactcgagcctctacaaatgacctgatagtgcggcaccgctggactctgttgccatggagaagggtgagctaggagctagcaagggtcacggagcctaaatcatccagcaggttgctggcaagagaagcacaacaagagcccagagagatctttcaacatctctttgccaagaaaaatggaaaccagcccaggcactagacctagttttatgcagtctcgagaataatcaatgatgtgggtgcttgggccaagccaggttgtttgctggcctgtgcagctgggcgccaatggcactcatcaaccaatgcaaacctcaaccatgggagtgaccctcatttcctcgtgggaacaccaggtggtgatgctcacaagctttcacctacagcacgaagaactctcagtccagagacaggtatgaaagatcttccaggcaggggtgggcgtcgaaggatgtgtgcacgatgggggcctggcacagagaggccgtgagaccagccagcctcagggggttcaaatttggaaacagagatcccaggcctgagaccagctcaaaaggtggcaaaaaaaaaaaaatctccttcctggggaagtaaatcattgaattggcaagtcttcgaggagtgctgatgtgcatgctatccgggtggggaacgtgaggaaactgtgtgcggtgcagtccccaggctcaggaaacaagggtgaaggatgagcagggtgcgacagacgtgaggccattagggtcactggaggaagagctgagagggccccggagtcgctcaaggaagcttcgtagagagaatcggaatgggactcacgaactattgctcagctgacagctccttagcacctgcttagggctccacacacacactctggttagaggctcccaggaaccttgtgaggtgggtgctcatagtaataccctgactttacagatgaggcaacagcacacagagaagctatgcaaccttcccacagtcccacagcaagcaagtgtgagagccgggagaggccaggctggcaaggagggatgtggaggggccaggcatggagggccttggaaaccacgcagaggagtctgggcctggttgtgaaggggtggagacccaagtggacaacctgcctactgaggaagagtcagcattgctgcccattggctactcccagtttgcaaccatgcaacaatattttgtcacatcaaagaaaacagagacatgcctccaaaggtccctttccccaagagctgggctggtctaaagtcacacccactttgcatgctgtgtcctcaattcctcagggactggtggaagaggagtgtggagtcaggaggtcctggaatttcccgtcctcagacttcctgatcctctgccacctcctttgtttatgctcctggcactgggggagggcacggggctgtccaggtcccccccactctgctggggagagaccgctgagcaaaggaggccactctacttcctttctttctttttaacataaggccaggaagccaggcattctcccagcagccctcaaggagcctccatcctgtcccctgtccccgctccctcccaccttcctggggcaggaacactgggtctgcctctggggctggtgcaggctctgctttcccagcagctggagagggagaagggagggctggcaatgcaggggtgcctgggagacagcaggctatagctgcatccagtggccagcatggcgggcagagataggatctgcaggctttcagcgggggcaggaggaggggaacctggggacggtccaggaggcgaatgcctctggccacttagcagacagtggagcctttcagactcaaaactctccactggcagcttccagaaaccaggcctttcccttctaaccctgtccagggtgtggacccagcatgcttgcctggcagggctgggggccacatctgaccctacctgggtagaggcagaccttgtgtctctgttgggccacctggacgttggcagccttgtgtctgggcaccgtaggccacgacacgggctggaggcaggaggcagggtgatgctccccaggcacccgctgcgtcccaggtgccctccacaataggctcaccctcaccaccctgaaaggatggcattccttccactttgctgatgagaaaatatggtttcctgcctgcacttctatctcctgggagagcttggatgtatgatttcacctcaacacctctctgtgcctcagtttccttacctgtaagccaggactaacacctcataggatctttgtaactgtcatgatcaggaactgctcagagaggttccctgtcctgccgagggacacacagtggggaacagggctgcacaccagacctgcctgactccaagtccatgcccttccatgagccacttccccgggctcctgctccctcagcgtcttctcctctccctgcgaggagaagctccgctacctgggacagagatggcattgtgtctgaggatgggggaggatgggtgagaatgggcatggtgctagtcttctgtccagcctgaagaaagccccaggaaagatgggcttcagcgctggtttatattctagatggctcctggcctgtgtgctccctcgctccctggcctctttctcctccctgggggtggggtgtggtggtggcagccagcgaggagaggaagcaggccactgctgtgctccgcgttgccctcctggccacacagaagcccacagatgaggagtgcagcctgcagcatggggagacctcgcagccatcagtgaggagtgcggagggagctgaggaatgccctccatactgccgtgggatgtgtggcaggagaggggagcggatggcgcctcagacaccccagagcagcccacaaatggagcccctcttggcttcgcctctgttcctccaggcaagcaattctgtgtctgactccgccagttgctatggaaacaatgaggaaaggaacgggaggggacaggcggatgggtgggcaggaaccaggcagtcaccactaggacacacacccctggcccctgcggcctaaaccctggcagggtggagagtggggcagggaaagccctccagcccatctgcaggtaccaaatgctgtcttggcccaggggttgcagctgctgcctggccaggggcagcccacgtgggtggcagcattcaggatcactggctcaggcatgcatcgagggagtgtccagcattataacaggaaccgcaacagccacagctctctcttcctgcaccaatgccaggtacagggactaacccatatcttgtcagccttctgattaaccccatttcacagatgagggaactgaggctcagaaagatgaagtcccttgcccaggacacacagcagctgaatggtagtgcagccctggagccctgttcttaacatgggaaccagcatttatgagggattaactagatccattcctgcccctcgtgctttgaagttggcccatgtgcccaatgaaacagccgtggcctgatggctcccaagggcatggaagcctctggatttggtgagtcagctgctgtcagaagccgttcacgtgtgtcagggacaatgaacacaagcagaaagccccgcttgacgcccatgctcccaatcctttgttgtctgctcaggctttgctgtggatttttccttccccagattcaatggatgctacttgagtgccacccggataaacggcgcgcccttcattcgagtctgtttccatcctcgggcctgacttcagcaacttccacaggcccgatgcccgggagctggcatgatgcaccaggcagtcctggaaaccctgataaatcgcccacctgggcaccatttctcagggcagcattataattgtaccagccaaatgtgctgggccgtctcaatgtgccaaagccacctgcaaacagatgggcccccagatttcctggaggcctctgggatgttcagtttgagggggtgcgggggtgctgaagtgaggtccttgctggtctcactgggcaggacagagctggagggcatggacgtcagtccaagggatcacctttggtggtcacaagtgctctgggcattttattttattgttttttgagatggggtctaactctgtcacccaggctggagtgcagtggcatgatcatggctcactgcagcttccacctcccgggctcaagcaatcctcccacctcagcctcccaaactgctgagattacaggcatgagccactgtgcccagcctgccctggtcattttaaattctcatcagtcggccgggtgcagattacacacctgtaatcccagcactttgggaggccaaggcgggtagatcatgaggtcaggagatcgagaccatcctggctaacatggtgaaaccccatctctactaaaaatacaaaaaaaattagccaggcgtggcggtgggcacctgaagtcccagctacccgggaggctgaggcagaagaatggcatgaacccgggaggcggagcttgcagtgagccgagatcgcaccactgcactccagcctgggcgacagagcgagactttgtctcaaaaaaaaaaaaaaaaattatcatcagtactccgtgggtttacttatcagaggccacatgggtgtgcacagggtggaaacaagcaccagggaagatgtatcattaacaggtatgtgggtgggaggatgcatgcacacgtctcagggagggtacaggccagaccctcgtgcatggagaagcagtgggaggcatggatggaactttgagaacggggcaggctggccattcccaactggaatccggctgggaggaaaggggctggccggggccttgcaaggcaggggaaacatgttgttcacttttttgttttgtatggttggtttttaagtgaaatttgagatttaaaaaaagttaaacgaaacaaaacaaggcgctttgggcagcaccacggacccatactggcctctgggactagcaacaacagctgctggacacttttctgtgccagcaaaagctggcgtcttcagggacagtccactcttagatggcccccgccctagccctccagcacgccacccctgctacctttgggttccaggccattggagttaaagtgcatcctcttctgacactccgtacagctcatcaggaaccgggtcacggcctctctcgggaggaaggcataggtctctgcgatctggaggagagaagagcttcgcttgttatatggatctgtggggaggcaacttggccatggggtcaccaaggtctgagctttggtggcaggtgcttcggctcttgcaaggaaagtcagggatttgaggagcaagggacaggtgtcctggattctcagctgtggcaatgagacagtacttttgtggaaaaccatttgttttaaaaatcgcaataaaggaggttaaaaattgaaaaagcaaaccctttaaacattatctagtctttaacctatattctaataagtaacattcctcagaacattttattgctgctacaaaaaaatgggcttacaaacattgctctagcgtagggtgagcagttcccctcttagagatggatagactgagacccacagataaattcactgccccaggcccatacacagaaccaaaggtcctacaagccatctcctgtgatcactgacaggtcaagaaccttcttaggaagagctgtgaagggctagtaccaggcatcagacttttcaaactagacaggctctgcaggacccccatgttccaggcaactatggcttggagaggtgagctgactccccaaggtcacaaggaattttcaaggcagtgccagactaaaccccatgttccaggtcacaccactccacagttgcctccagaaggcctcccctagttgaggaggaggacagggatgcagagggctgggggagagacacaaagaagggagggaacatgaaaaaagggctgggtgggggagtggggaagaagtggctgtgggcctaggtgtccagccctttcctcttgctctgggttttggaaaagccactgaccctgatttagctgtctggtggggccaaagagtcccttcagtcccaggttccctgggctgagactgcccagttactggttttccatgtgcttcctggagcctgggtcctcccgcacctctccactaaggggcagcatcacccaagcgttccgctgtcctcgccgcagcccgcagccgggctgggaaagttggccaagggtgaggggctgctctgcgctgcgcttggccccgccttcccacagcaactgcaggggtttgctcctttagaaatgcacgaatgtccttctccatctctgtgatggctggagggtagaggtgggctagggcggggctggggagtggagttgtggggggatgcagaaggcttggggtgtcccaggctgtggctgggctcttggaggaccagctcaggcacagcttccagctcagcccactggcagagtccaggggccactcttgccagctgcaaatgcgaagttaattttggtgacacaattgttatttctcagctgatttgatgctctgtggagcaggcaggctccttgatgagttatctcccttccaaattccctgtctgattgccttcctctggaggtcagggacaagggcaaaccccagtgtctctgactggagcagcggatgggagagcaacatcagggatgcagctggtccttgtcaggtgtcaggtccgagggatggggcttttctgccatgcacacagagagcttcatccctagcccaggccaggataaatgtggccaccactctacccctggagagggagccattcctgtgccctcagtaggccaggcagcaagaagggccctgcccatcctgtgtgcagccctcagcagagcagcccagggctgcctggaagtctgggggcacgttcctctcaggccagctgggtctggagagagatgtctggctgaagggtggcagctgcaggagcaagtgtgcaggagggaagggcgtgtgctaggcagagcagagggctgtggctgacttgggccgacagatgcccctcggctcccctgagacgtggcaccctaggtcaggcctcaggagagctcagtggagggcccgggggagggttgcacagtcagctgggagaagagggccaggtccctaccatgagggcagccctactaagctacccaaagcttgcctgctcacctgccaatgggcagagaaatattttttaaagggctcagggggtcctcctggcctggctgctctgctgagggctgcacacaggatgggcagggcccttcttgctgcctggccagctgagggaataggaatggctccctctccaggggtagagtggtggccacatttatcctggccttggcagggaccccagcagtgtgcaaaggctggctggcgtgccacagggaggggagtgctgagcacacaccttctggccctgggtcccattgatgggtggaaggggaggatagaaggctgacaggtgagaagtccttggaactgcctgagggccagggagggaagccctgccccacaaggctggattgtctgcaagcctggcttagagctccctggggagtcaataaagcgcagagtccagcccagctctgcactgccgtagggacctgtatagaggatgacaaaccctccccctgcaaccttcagcaggcatcttctgattcatcttcctggcttgcctgggaccagaaatgggacctccatttctgattgagtgcacgaatgcccaaggccacaggaccacagaatgagtcgaaaccaggaggacaatcctagcagatgctctagttaataggatggtggttttcagatggttttagatttaagctgcagaccctgttctagaaatagactcatacactgaagcccaaaacatgaaacagataaagacagagctgctgtgtctaaggaggggaagttccaggacccttgtccctgcccaactgccctccgctgccctgggctgcctgctgccttgctccccgggcctcctgcctggacactgagtcccgtatgtgaatttgcctttcacatttttcctggtggtaaaaaacagggacttcactggcagagagagcaggagctatttgcagagtcgctgacttgcaaggccccatttcactccccaactcagaggccaacaaagacagatgaggccaattggggggatttgcaccactttacaagatcctccttctgccctgagggtggattagcacgtggtgggcctggagcagctgctgaccacatctggccccaactccaaagtggcctgggcagctagatccggactgtggaacccgatctgacctaccagcaccctgggagggaaaaaggaagcaaaagggcttgttccaacccagaagggtgcagaaatcagaaaagcaggaaggccccttggaaaaaggactagccctctgtgtgagttcaggaaactctgtagaaccagctggagccttcctcaaaccctggtgctggagagacctccgagatcctctgcacctcaggtcacactgagaagctaagtgagacagggacttcctactcgaaatgggaatccctgcattatccattgcacatggccatctaactccagctcgaatacctccagtttcagaaagctcattgcctgccctatctgatccacgggtggacagcagtagatgccagaaagctcttttccctaccaaataacacgcctcatttagtgcactgaaaaagtctgccaccgccctgccagtcctaactcctatagtaccctcctaggcctggaaaaatccagaggggccctgtgccctagagactgtcaggcagtctgaggattcagcgttggcaaaacacagagatagatccaaaaagtcctcagccaggagcttgatgcgtaccccgtgatgccaggctgtgcccctctgcagccatcagcaggggtttccttgggggctccttccacaggcatggatgggtgggggcctcgtgtctgcagagtggggctgaagagctaggtatgggtcgaggaaaatgggagcagatgaagaggggcacaaaggcatccaggcaccaccccctgcccccaaaaaaggaaaagggtggcatgagaagggtgacagatggggaggagaaggggaaaaggagaggaggcacgtaggggaggagggaggtgtgccagccccttcggcctcacacccacggcaggagggccctggcctgctcagctcagccttggccctgctgctgaaattccagctctgtgtgcagctcagctggctcagtgccagtcatgtgccagctccaggctgggcagcgggaagtggggcacgcggcaggcatatggacgagaagccaggaagtgcagagcaaagggctggatgtccgcttggcccagggatgcaagtgctggcagaaccagctcagccctgccctccccacagcatggaggccgcagacccctgccttcctaaaccgcccaaagagtgcctgtggacgaggcttgatgctggacaccgaaggggccagggaaaccacatgatccagctggctccagcccatccgcctggacaacagcaagtcatagggcttactagctgaccacaggagggttgcagagaggcaggatgtgtggtggtcagggcacaggctctggggtgggtggcctggctctgaatgtcagctgactgacctcaggcaggttatgtgtttctctgagtctcagttttctcatcttaaaatggaggtaacaacagcacctgcttcatgcatgcaaccttcatacatgtgtaggaagtgctggtgtagagcacatgctgactgctcagcacaatggtgaattttatttatttctttttgagacagggtcttgctctgtcacccaggctggagtgcagtagtacaatcatagctcactgcagcctcaagcaatcctcctgcctcagcctcccaatcagctaggactacaggcacacaccactaggcctgaattttttaatatattttttatttttatttttggagacagagtctcactctgtcaccctggctgaagtgcagtggcatgatcccagctcactgcaacctctgtttcctgggctcaagtgattctcatgcctcagcctcccaagtagctgggattataggcatgcgccaccatgcccagctaatttttgtatttttaatagaggtagggttttgccatgttggccaggctggtctcacactcctggcttcaagtgatctgcctgtctcggcctcccaaagtgctgggattacaagcatgagccaccacgcctggccccaatttttttttttaagagaaggggtcttgctatggtgcccaggttggtcttgaacttccagctcaaacaatcctcccatctcaaccttccaaagcgctgggattataggtgtcaaccaccatgccccacccacaatggtaaatttaatgctgagaaaatgtggtcttgtcagtgccaaggggcccatgtgggccccagcctgggtgcctcttccttcttctatgatcctctggtggaaataccctcagaactcccttcccacaagtcacttcccaaagcacacagaccgagaagcaggaggggcggggagaccatcaccatctcctgccttcctgggcagacaccttgcctctctgaggctcttggcacatgggtccatccttaaaatccatttagggcaaaagccattttctgaggacaaggactaaccggatggttgcattaaaaaaaaaaaaaaaaagatgggccataaggggaaattatagactttacagccacctccacggtagtccaaagctatttatacaaagaacttggggtgggaagtttcacatctgccttgggtggggaagcccagccacagaagggcatatctctagaagctccagagaaagtcggcatggaggacactggctgactgcaactcagctgccgtctgaccttggacaagtgacccaattctctgggtcccagtttccttaactgtgaaatgggtcctcagtgcctcggtcacaggactgcatcaaggcttgaatgagcatgaagggcttggctttactggcttccctgggcactggacaaatggttcagagctatgtatgagctgtggataggcccacatgtgggtcagcaggagatggatcagaacacaggcaggcccctctgcagggtgaggaggggcctctggtctggccagtcccatctatttccacctccctggcatttgtgatgcttcctgcccctaggttgccttttttgcccttatgcctccccaaagcgtagaatgccagtacaggtgtcaccttctccacacagtcccccgggctcatctgtgtctggcggtgcctgtgctaaatgcccctgagcctgggttcttgctctctcaaagcgagccttggagacatttctgcttctcatgtatcttgtttttgctctcagcctccccaccccaaatccaattgtgatctcctggagggtggggagcaggtccttcgacttcccctggggaactcccagtcctgacttcacaggatgagctcacacataggaagagctcaggacaggcctggcatgcagtaaatgccatgccatgaaggcatttgctcctctgattattatctgtccccagcaccccagccccagaacaggctgcaaggggctgggggtggtgtcgggtgggagcaagtgaagcagaaacggggaagaggagggcgcctcctgccctcatccctctccttccctccctctcacccccttcaacctgcttttcctttgtgctcagaccacagattccctcccctcgccctgtgagccatctctggctgccgtgcccttgccctgtgcccccctagatccccaaaggccgtttcatcacgcctcagctccctgccccgccccccaagcccaacatgtgcggagcccgtggcctcctgccaaggcctggggctgccagtggaggcaaagagacagaaatctcaccgctcggtaggttttcttctgcccagcgtgcttgggggctttgcctggctccgctgagctctccacatgcatcgagtagatgatgtcaaagaaatcttccaccacagcgacccgcttcagagagatgccctctggctccgacaggccatctgccccctgcgacagggtggacaagctgtgttagtgtcaggaatgatggcggggtgagaactgggccctgaggccggggcaaggggtcaggacgggcaatgcctccgacagtgggtcttggggtggggaggggagggagcctaccgagggggctccctggagggggacgccagagtcagggtggctgcagctatgaaatctaccagcaacaatgggcagagaacggcgacaacgaaaatacaaattaaaaaaccaagaggctccatgttcacaatttcagacagattgtgccagactcgggcggggagctcttgaatcacacgctgtgccaagaccatcctggaagtctctggggaggggggagtgctaaatagatgcggccccatcaggagctcgccaattagcagtaacctttcactgtgggcctgggctggggtcccgggggaacagctccgatcacctgggtgactcctgcctccgccctggcctttctgaaaagcttttcgcggctgcctgccctccccactccagcagctgagcgccagcaacggcacccgggccctttgtgtgtggagatgtacagaataacaggcacgaggccacgaggaggtggcagggccgtgtgaacggggcggccgtgggccccgagcctcttatcaggctggctgagtggtgtcagctggcccgactaggtgtgccaggagcaagacgggtccttcaatagcaaacagctgtggggctgacgcctgccctcccctccagcaggaaagggggctgcagggaaaccacagggcaggaggctgggggtgaggccagggcccggaagggaacggactgctggggaactgctccgtgcaggcagtcctcacaagggagatacacagacccagagacactaggctgtcagccaccagctccttcaggggagtctgtggggacgttagggggctttgaagatcaagagcaagccatatggagggaatttgaggggaaaggaagcaggcttttctctaaaagtgcccaaaagacacatctccaagagaattcttccccaaaggaccccaactcaaggatgtcagcaacaagaggatgtgggcttcgcctgctccttctcagctctctccagcacttacaacagtgcctgacacatagtaggtagtcagtaaataatgactgaatgactgagtggtcataagtggcagctgggcagggtcacttggacacactctgccatggtttgaatacggccccatcatggaagtggccctgtgaccccgagcacttactgtgcttcgagcttcaggccctttatctgtaaaatggggataacagaagcccctttcccatgaagaactgagttgtgtgtgcagcacttggcactgagcctggagtacagggattgctagatattgttattaagaagtgctttgcagttcaccatgtttcccccaggtatgagagagccgaacaccggggcaaccctcggaggttgttagggtcaggacctgcctgaggtacagtggctggtggatggcacagatggcttcagaccttggactctgtagtccaagtagaatacaggccacactgggaggtgacgctcgctcacaacacgttctggcacagacaggtcttggtttcacccagtagctttctcgacacaccatgatggccgaacagcagtgtctcttcaccagcagcccattcaagagcagagagcagatggggggcaaagggcatctgggatgtggggtcccgagccccacagctagcgggcagtgtccctaagtggtaaccctgggaggtgacctcactggccccaacaaggccctcttgccagtggcttccttcctggtcagaacccatttcagtgggacgtctcagatagcacatatctctctctctctgtgtgtacaggagaagccacttgctggtccagcttcctcgctgtgagattatgggcaaacccttcaacctccccgagcttcatttatgagatgagctgtaaagttccatgacttttctgctcttaacctctctcaggaatcaattttacctcttttggggagtatcccaccccctccgacatctcaggccatctgtacgggctgatcaatgactaacttgttcactattgacccgtaaatgcccagcattacagggctcttcatatactgccatgacagggttgggatgggacaaatattatgataggtcagttagacttttaaaaaattttttactcagcaaagatatggatttgggatgtacagttataatacacttctaaccagaggttcacattggtgaaaataaacaaaatgaaccttaagaatgaatatagctggttttggctgggcgcggtggctcacgcctgtaatcccagcactttgggaggccaaggcgggtggatcatgaggtcaggagatcgagaccatcctggctaacatggtgaaaccctgtctctactaaaaatacaaaaaattagccgggcatggtggcgggagcctgtagtcccggctactcgggaggctgaggcagaagaatggtgtgaacccgggaggcagagcttgcagtgagccgagatcgcgccaccgcactccagcctgggcaacagagcgagattccatctcaaaaaaaaaaaaatgaatatagctgggtttctatttgttgatctgggcagtagttatagaagtgtgttcaatttattaagtcattaaatcttaacacttggccgggaatggtggctcatgactgtaatcccaacactttgggaggcccaggcagccagatcacctgaggtcgggagtttgagaccagcctgaccaacatggagaaaccccgtctctactaaaaatagaaaattagctgggtgtggtggtgcatgcctgtaatcccagctcctcaggaggctgaggcaggagaatcacttgaatccaggagacagaggttgcagtgagctgagatcacgccattgcactctagcctgggcaacaagagtgaaactccatctcaaaaaaaaaacaaaaacaaaaaccttaacatttataatctgtgtatttctgtatgtctgataaactttaatttaaaaaacagtttttaaaaaggatatcatgggggtagttccactgaatttttaaattcaggtaaaatacccatgcagaatgtaccatctttaccatttttaagtatagagtgaagtcagccacatttggatcacctgaatccagaggcatagctctagaggcttagctgcttaaaggccaatagacctccctgttcaaaattgtttcagaccagaacacagatatttctggaaaaggaaggagataaaattttgtgggaaggaatggagaaagaaagcaatctgatgaggagacaatattttatgtaggtgagatggaaatttccccctaaccagcttgtgggggccttaggtgggttactttatttctataccttttttttttttcttttttttgaaacacagtctcactctgccatcaggctggagtgctcactgcaacctctggctcctgggttcaaacgattctcctgcctcggcctcccaagtaactgggattaaaggcgcctgccaccacacctggctaatttttgtatttttaggagagatggcgtttcaccatgttggccaggctgatctgaaactcctgacctcaggtgatccatccacctcagcctcccaaagtgctgggattacatgtgtgagccactgtgcccggcctatttttatacctcttgaaagtcagtttccgcacctataaaatgggcctaaaaagtgctagttggatgttccaaggatcaagaatgtatgtcaggcatccagcacatacagacttggttaatgttcatctcttcccttggacccctctgagtctggacattttgtgtttaggaatctcctcttatctctggtccctctgacgcgtccagaggggacccatgacaaaatgtgtccccctcagtaacacccaccatcagaagagatgcacagtcttatttaattcctaaataatatgctaaggctcccacaaacttggaataagctttccaaaagtcaaagtgtaattgaccaacccagataaaaaagcaaaacgtactgtcccatgtggcctgtctcttcccagcctcccacctgccctcttaggttgactctggtaaacaacagctttgcacctggtccaatgtgaccataaaattaatcccagcaaaattattcagggaagcagttttcagttagttccttctttaaaaattgatcactttctcccttaatgttcaaatttgggtcctgtaatccacctatctctacagcaaagatttacataggaaaggagagggcctggagcgaccagaactcaaaccacgcaagggctgcagagccataccttgaactgtcctctggtgagctagggccacctggattccatgtgtgctacaccctaggggaagaacgccaggatgtctacgtggccttcaaggagaaccctgagaagacagcaacaaagggatccgacagtagtcacgtgccgcagacatctctgctatcccttgcatccatggaggtaataaccttcatgctaaatgctgcaggggaggcaggccttccctagctaaggatccagacagtgctgcaagggaagagctgctaataaaggaagcagaaagcaccttccctgtagacttgggaagcccctgccatcccccttctgcctggtacccaaattagcttcatctaatccattgccctaagcaaactggacagtgaattgacaaaggaagttcactttatctataggctggatcaagaagggacttggagtctcctgcctatcccagcttcctggaaacacctagcaggagtaatggaatggaaccctgtatcaccccatgggaagaaccacgaaaaacacacagtcacttgtgtaggatcaacctctggggccttcctgcatggagaagaacattgccatggtaacacacaccatcctttcgaaccatccaacccccaaacagcctgccagagccaggccaacagaatcagacatggcaatagttttaaaaatttatggagaagctgggcatggtggcgcatgcctgtagtctcagctactcaggatgctgagatgggaagaccacttgagcccaggggtttgagtctagcctgggcaacacagcaagacccatctctaaaacaaaaacaaaaacaaaaaaaacctacacatttatggagctacattcttggacatcaccagctcccttaacaccagcccatttgggttctaaatgaaaagctaggtggcaagtcattgacaaaatcaccaaatgtctacttaaatacatctgatatttcaaaatattacagcaatggtccttagaccagcagcattggcatcacctgggaacttgttagaaatgcacattttcaggttccaccttaaacctaccaaatctgatgtgctgggggttttaacaggcccccccagatgattctgatgcaagacagattttgagaactgctgatcagaatgtctccatgattgagccagggaggtaactgtaggaaaacaggtattggctcattaaatatagacatgctctgtgcttcctggcctaatatattaatattttcatttccgatgaaggccaattttcctaatggtgagaacaaaagaatcttattgggcaacattagtataaattcaacacatctgcccagagacttaatgtggattatggatagaaagagcaggaacgccctgcatcctgacatcagatttttaagtcctccctggcaaagttaataaatacttaagcagggcatcccttggcaggtcctttctggcttcctcgttttcctcagatggatctgaatgctcagcatgctaattcccaggctgcagacctaagagggggatcggcatgtcttaccaggccattagacaggctcctgccggggcgacctcagggagctcctgaatcggactgaatcttgcctgtctccccacatgagccaattaaatggacccctgcccctgatggtgaagtgaggtccagttgctaatggattgcagttctgtcatctccattagagcttcgaagtcacttgctggtaataagttacatacttatcaaggtgggatcacagttttaggccaccagggtgccatttagtgtgccaccatcactatattagtagagtgtgccttccagcaacgacgaggccatggttgagaggatgcggctaaatagcggagacatttctcaactgggtttctccgatggtagaagaaaaaaccacagagaaaggccttaggataggccttctggtgcatttcggatccagctcttgacaaggaataaaaatcaacgagattgctattggacgagaaagtcagccagtagagcccaccccaaaggaagcaaatctttggctaccacgtgggagggagcccaggacttcagggggctgattgcacaggcaaatgtgaggatgccgctccatcccatccaggccatcaaagtggctgagatcacagacaaaaattaccctgcatattaattactagcatgctcttcccaacttctgcaatcatgccattcctcctgtccccaaaacccagccttaataaattcagtcagggctgggtgcaatggctcacgcctctaatcccagcactttgggagacagaggtgggaggatcgcttgagctcaggagttcaagaccagcctgggcaatacggtgacccccactccccccaccccccgccgccaggaggtctctacagaaaatgcaaaaaacctagctgggcgtggcggcattcgactgtagtcccaggtactcaggaagctgaggtgggaggatcacttgagcctggggaggtgtaggctgcagtgagtcatgaccgtaccactaaactccagcctgggtgacacagtgagaccccatctcaaaaaaaaaaaaaaaaaagtcagccagaactggagttttagaagcttctggggggattcctgtaaagtctcatttcagctcctggtggggctgaaaaaagaagcaagggggaggagtcagtctcctgcaaaggggccccacagggaaaggaaggaggaggtggagaggaaattgaaaaccacactaaactaagagaacaaaaagaaaagaaaaccagaatgaagaccatcacccaaacacccagaaaccctctcttcagcatccccaagagaagctgtcataatttgtaaagggcaatcaggtgattgaagagagggtattgcttcactgggacaaaggcagtattttaatttctctcggttctgaatactacctactggggactggaaattgaaaaaaaaaaaaaaaccctccaaaataggaatttaccccagaattttaggacccaaagttccattgagcttcgtaggcctggatggggcagagggatgggaccacactctccccataaataaataaatacataaacaaggcgctgaggactcaatatagcacctgcctcttctccacccttgtgcacaatctccaactgttagcgcgtagctgccgccgccaccgccaccaccgagtcgcacctgccatctggaacaggcctcacatattccaagacctcctttctgcttcgctgaacctccatcttctttcaaatcacgctggggaccaaaacgcacaccccaggccacagagaaaggtgcctgggaccagcccctcaaacaacggcgctacatttgaggatgtcatctcctccaagcagctctgagtcttttttctctttcttttgggttttgttaactctgggatgtctggaatgggtgtagggggaaggaatgggaagagaaaggggcacagtgggccacagtgccccccagttagaaggagaggggctggggaaatgcagatccgaatgacaatgacttatgagggctggagggaggagtactgtccagcatccccggacggacaggccagggtctgggcctggctgcaggactctggcctggcgggggcagggagagggtccacaggagggtgctgtagaggtgaagtcacaggcctaaggacaacccagcccccaccccaggcaaggggctgtcctgcctgggcctcagtttccccctgtgtgagcagacaccataggcataatggctttcgccacctcataggaagtgtgtgggaacccaaatgatgcacaaacagcacccgccctagaagacacccattaaagagctctgtctgctactctggcgacccgcctcccggggcaccgcagcctaggacagggaatcgggagtcaccgaagggggggtcctaggcggaaggaggtagccctgagccagccaggccccgcgggcgggtccctctcgggccgaggaggcgccctgggcgcgctaacgagcggagagccccaggtgcgggccccacccagggccgggggaagaggtggggctggagggggaggggagtgggccgcgctaatgactgttgacagcgcgcgctggggccgagctggccgcgcgcgccgctgacagctgctcgggcggggggcaggggcgggggcgaggcggccgcgctctcttcacggcgcaggcgcgtgcgccccggcggggaggggcgggaaggcgcgcgcgcgccgggctgggttcggagggcctgctggagcggctcgcgcgggctcctcgcgggcaggcaggtaatgagagtaaccatggcaacccaccagaggaagtgtattctgcaggagacgttaatcccctctccccggagctgggacagcctgactttccattctcacacagtaattagataccagctgtcagtgcaggggggacggctccgcggctgcagcccggctgggagtgggggggggggggcgcaccaacggggcgggggggggacacgcaggaacgggggcgttaaagacacagggacgctcggctgcggcgggccagggcggctggcctccccctgtctccagcctctaggcgcgcgcccgctcacctggagaccgcgcccgcgcgggccccgcccaccccacgcgcacctgctgcgcgcgcgcccgccggcctcgcgtcccccttccggccccgccaaccggctcccggcgcacctgccctgccccgcccccccgggacgctgcccacctgtcctttgtgcagggcggtaccattcgatcttgccagctctccttcagggagcgcccgctatgtgccaggcgccgtgccaagcctgatctcccgtagtcctcacagaccctccgcggtcagtgcctctgctgctccccgcccaaggcgcagcggggtgtggccatttgcccagggtcacgcagacttgaaccccccatccccgtgcccatttaacaaccaagatactgcgcctcccaccgcgtccacatccacatctgctgtggctccggggcctcctaaccgtcctgggagacaaaacagtcacactggtggctggcgtcgcggtgcacctactgtgtgccaagcactcacggcctcgtttcactttcgcaacagcaacgagagatctgttgtcccagggtgaggaagcaaaggcacagaagagctgaagcgatttgcccacagtcacaaggtacagagtgacagagctggggttcaaatccagggagtcagaccccaggataccaactactgggctccattagtcccacccctggattcgtggtggctgaaatccagcacacacctcttcttcctttcctcagttcagcccacgcaggttctgtcccagcatcgtgagtagctgcctctcctagccatacctgagaaatcgaagaagtttctaggcctaaagccactgccacaacccgcgtttctttttttttttttttggagacggaatcttgctctgtagcccaggagggagtgcaatggcaccatctcggctcactgcaacctccggctcctgggttcaagcgattctcctgctacagcctcccgagtagctgggattacagacacacaccaccatgcctggctaatttttgcagttttaatagagacagggtttccctatgttggccaggctggtctcgaactcctggcctcaagtgatcccactgcctcggcctccaaaagtgctgggatgacaggcatgagccaccacacccagcccacaaccctcatttctgtcaggcctcccaaaagctcctactgtcagtgcaggcagctgcttggaagtcattctaggccaccccttccatttcccaggtaggtgaaccaagaccattcaggtgcgaggctggcctgagtcagagatggcctgggagagcctttggggggcagggagggttcagtcccctcaggcctggctgtgtcccctgccccccacccacaatcaggcccagggttggggggtgcacaccaaggaggggcaggaagtgtccaagaagcagaaccggctctgtgtccccagtggcggcgggtgtctggggcaggaggaggctatctgatcccttccccactgccccggccatgacctcctccctccctccctcgctccctccctccctccctccctccctccctccctccctcctccttcatggctggggtagccagcaccctgggctgcagctgagaacccagcgttccccaaccccgccagcattccagtgagaggaggggtggggggagactgcacccagagctttagggacaggggcacccctggggctgctccactctgggagggccaaggccaggctgcctccaacctcaccgtttcctgcctccgctctccccatctctcagtagcagagctgcctaaatttggctccaggagggaatgggggaggcagcggcaggcgggtgccgtcagaggccagggcgtcgctcccgtctagccggctggcatttttgctgtctggaggagggcaggggggcccggcagccctctcccggaaagggagatgttcgtaccttctgacatacactgagtaatgtgcaaacgacatgcaaaccgagcttcaaatcagcatctcagccagggaacagcttgagagctgcttttgggatgagagcagaaggaccagagcccagtgcccaggggctccagtgggggtggggtggggtggggggcggcacagagtgtctagggctgggcgttgggagactcagtttcttgccagctgcagggctttgttccagtggctggaccctctgggtcccagcccaagggcagggccatggctttctctgcctgctccagcaaagcactgggcacaccctgtcacgtggttaagcacgtgagttctgcagccatcctgcctaggtttgaaccctggctctccatgggccagctgagtgaattcctcaatcgagcacccaggcaagcagctagtggaactgggtgtctgttttagaacagccacttcccttccctggaagttgggcacgggggcatgacgtgagagaacctgggctttggaatcagaactggattccaggcctcactcagccagtgaggctctctgagtctcactcccctcatttgggaaatgggttcaggatctcaaggtcagctgtgacgtccacgtgatgaccttgcacatggtgggcacacacaggccttcccatggtgcagcctcactgctgtctgcattcatgtgactcctagctccatcctgtcccatcgctcctcttctctttgttcttctgtcctggctttttcgtctctagatgtaaatttcttgcggtctttttcccttctgtctctcttcttaactggtgatcttggaaaagtcattgcctctcagagtctcagtctgcatatcttctaaatgggagtaaatgagaggtggacaatgagctctgtctggggcctgaggctcatctttacaagaccgcccacccatcattccaaagggccaccaggggtaggctgtgccctcaactctatcgggcatggtgtgttgggggctccacttctcagtaactctgtttaaccccagataactgctctcctgcccctcggccggggctgatatgagctgaatccagcttcctgccacccaaaagccacttcctgccaagctgataccagaagaacttgttttctgtgcacagagcagtctctggtggggcagccaccagcttgcctcgggtgtgaacatttttttccatttgccggtctgtctgctgggctgggcaggggaggctggggactctgaccccttcgcctctgcacgtgcctgtcctgccctgaggtagcctctgggcccaccagccatcccaggaagggtgccaagtgtccctctgggcccagacagatgtgtgtaggccgtgacacacagtctgacacagccacacacacacagtcagtctgacagagccactgtggccactgggcatttgggcaaggactcagggagacaatgtgtgactgtcacacacagttaaggtcacagagacatggacatagcctcacacatgcaaccatctgcagtccttggacagtctcacacacaattacacgcaggcccacagccatgctcagaatcccacagcactccacacagcttcacacatgtacacgggaatcttcctccccggcccccacacctgcccagcaccgaccttccagatgcattcactgattcaacaaatcctttttgagggtcttctctgtggaggccctgggctaacccataatcagaatgactggaacaggaacaaataattagctgccctgtgctgttgcctccgtttccccatctgtgagatggggatcctagccctgccacatgggactgtcaatgttaggagtgaatgtgtggaaagccctcggtccgtgtttggcccacagtgtcatctaagtaaggctatcctggttagccaaaagcatcccatgcccagctccacgcagaacacctggcacacattatctccctgagcccttgtccaagtccccagcagctggggtcatcgcccccattcctcagatgaggaaaccgaggctcagagaagaggcccacagtctgtaggttgccccaccgatctcatgtcatgccacagtgctgctccagcctgcctcgccaccccctacacacacacacacacacacacacacacacacacacacactattccctctggctagaaggcccttctcacttgcatatagcatgcccagctcctctgagctgcctacttacacttctgtgaaatggggatactagcccgtgtcagcccctgtttattttccccagggcactggactttaagggccaagagtgaagaccattttgtcctgttctctggcacacagtaggcactcgacaactatttcaaaactaaaggaataagcaagtggcctcatggctactgaggacagagtctggaactgaatgcagggcactctgaagctggagctcacttctacattattgcctttctcatgctactagcaggcactgaatgtgtcagtgagtgaatgaatgaaaccaagatctcaggatcccagtcaagtgctccctgagtttcatttcctggtagtgtggacatgagccaagctccagccaccttggatggtggtgggggtggcggggctgatgggccgcctgaagccggctgtcaggagctcgtctggccacagccgccagcaggagagaccagctggcggtgcagggtccatcggcccgggcctggaatctgagctgccctcagaggcccagcttctctctgggcccccacaaactggcctttgttcctgggccggccaagacccagcagcttgggctttctgtctgcccgcggcacccgcgctgagctggcggggtaaatgggccagcctcccctctgtccatgcccaggacgtcgctttaggactaaatggagatgtaattttctatacaaatccatgacaatttagatggagtgattgtaattggcttttcaatgggggttttgtccagagctggtggctagaactgggtggcctgtttgaggcaggctccatttaaatgacaataaagcaataatattgaggacttgtacagtgcccagcactcctcccagcccaagtagagcctcatgtttatggatctggtccttccctgaggctgtctggacaggcgggtggtggggggcgctaagcccaggagacaggtggccatatctttgggcttcaggacacagagcttcagaatggctggggcaaggtcccgcatccactggcttacctgtgtccttattcctgaaactgtcactaactagtgcctcctcgggctagctgctagtccaggtttcgggggcaccaagacaatgagagctgctcaggcaggtcagagggagaaggctacaatggccagtacagcatgacatttgagagcatgaccaagagatgaccaacagccagacagcctgagctcaaatcctactccacttctttttaaaaaaattttttttgagacagggtctcgctgtgtcacccagactggagtatagtggcaggatcacggctcactgcagcctcgacctccaaggcttaagcaatcctcccacctcagcctcccaagtaactggaccataggcatgtgtcactacacctggctaatctttttatttttttgcagagacagagtctcattgtgttgcccacgctggtctcgaactactgggctcaagagatcctcccgcctcagcctctgaaagtgctgggattacaggtgtgagccactgtgctcagcccctactctacttctgactcgtctcttgaaccttaccaagttacttaacctctccatgcctcagtttccccagccataacatgaagctgcagtgaaagtttttgtgaagatgaaacaccttaatagtgcctggcatgtggaaggtgctatatataagtcattgccgtgattcattccaagctctagctctggtgtcagggtgaccttgggcacgtgacttaacctctttaaacctccactggctcctctttaaagtggggcttttaggagaaccgacctcacggggttgtgaggattttagaggatgcaggaaagcgctgagcacacagccgttctcgataaacacgagctctcttgctgtggtgctcttgccttgaggagctcgccagctagtgatcattaccatgtcgagtgtggggaaaagggaaaagaataaagctcgcgggaagccaccacggagctcagctggctctgccatcaggggatgcaataggagagaatgatccagagggccctcaggaacagggcaaggagtggggctgcgtgaaggaaggcttcacagaggaggtgacatttgggctgggtcttgaaggatgcgtggcacttctgccaccagaaagggtgatacccagcctggccaacatggtgaaaccccgtgtctactaaaaatgcaaaaattagctggggctgggcacggtggctcatgcctgtaatcccagtactttgggaggcccaggtgggtggatcactgaagtcaggagttcgagaccagcctgaccaatatggtgaaaccctgtctctactaaaaatacaaaaattagctgggtgtggttgtgggcacctgtaatctcagcaactagggaggctgaggcaggagaatcgcttgaacccaggaggaggaggttgcagcgagctgagatcgtgccattgcactctagcctgaatgacagagcgagactctgtcacaaaaaaaaaaagaaaaaaaagattaactgggtgtggtggtgcacacctgtagtcccagcttcttgggaggctgaggcacaataaccacttgaacccaggaggtggaggttgcagtgagccgagatctcgccacggcactccagcctggatgacagagggagaccttgtctcagaaaaaaacaaaaaaaaaaagataccagggtcaggcactgtggttacaaagtcaacaggcagacctggctgcctcctgaatgagtgatttgtgcctgtgaaaagggtggtggacagggagcctctgctgaaggtgcgatgttaagtcacctctgaaggccaacagcctgtgcaaaggtcttcaggcaggcaggcggccggcatcgtgggcagtggtgtgtaggatggtggggaggctatgctgaacgtgctggagggacggatggggtggcggctgtattcacgtgaaacaggcagccatagagggattttaagcaggcgggtgacaccatccagaggatatttttaaatgatccctctgactgctcgtggaaaatgggctatggagaagaaggggtgagagagaggcagggaagccatggggaggcagttggatcactgggggagagaagtggttagacccaaggtatagcagggcccaggagctgctggaaggatgatgggaaggcagggggcgggtggagaaaggaagggggaaggggtacaaagaggcatggggcctttgaggcgtggtgaggggctgtgtgcagctggtacctgagcagggttggtggaaggagatagcagaagagaggtgagggccacctcccacctccctgcgccaggctaaggctctccagctttgtcctgaaggcagtggggtgccaacaaggatttttctccaggcaggaaaagaccatgctgagatttgtgcttttgaaggatcattttggctgcagggtaaaggggtgggaggtggcaggtgggcgaggctggaaggagagaggcagggagggagggtggtcagtggcggctcagaggcctcagcaggcatcctggccagctcccaactccaagagcaacaaaccactttctcagaggtctaaaaccagccccaggtcacacggcttgtcaatggcagagatagatcccaccccagggtgaactcaaaatccagtgcactgttcccctttgctatcaacagccttggtcactagtaaaatccatcacaaatagcttttcatcacgactctcagagaacccatactatgacacgaaaaggtgagtactattattattcctattttacagatcaggaaactgaggctaagtcacctgcctaaaagcacacagctgggaattgacagccaggttcagatctaggcagtgtgactccagacccacaccacaggtcctaagcaggaggtctcaggccaagtggggtctatggatgtatctgggggaacctacagaggtttattacaatttgagtttgttgctgatacttaaaagttggggctgggcatggtggtgcctgcctgtagtcccagctacccaggaggctgaagcaggaggattgcttgagcccaggagtttgaggctgcagtgagttataatagtgccactacactccagcctgggtgacagagcatgaccctgtctctaaagaataaaaatttttaaaaaatgggacatttcatgaaagaagaaaaacatgaactttggacaggacctcctaatgttgacaaccccaagccccagtccttgaacttcgtccaccttggggccactcacacgtgtgcgatgtcacgttgacatctccagcatgggcctctcctctgctgccggacagccgactggactgaaagcaagtgtgtgtctagggccccctggagagccagggcgacacatccatccactcatccagcaagcatttagacccccttcccccgacccgcccacagccctggccaccaccaccaaacttcctcccccagcaggcttctccatctcccttgcttaggccaaacaccctgaaggcatccttgactgctcactggttctcacagcccacatcccatccatcagcaagttctgttggctccacctttaaactatatccagaatgcagctgcattctccgctgtcccaggggctggaggtgcagggagaggcatgtgccgttattctagcgtgctgagtctcagttccattgtctgtaagaagggcgggctagagcaggatatttggattgccattattcttgtgtccagattttggagctaggaagagcctgtttacaagacacttaggttgtaattctttttttttctttcttttctttttttttttttttggagacagagtcttgctctgtcgcccaggctggaatgcagtggcatgatcttggctcactgcaacctccgcctccttggttcaggcgattctcctgcctcagcctcccagtagctgggattacaggcaggcaccaccatgcccggctaatttttgtatttttagtagagacggggtttcaccatgctggccaggctggtcttgaacacctgacctcatgacctgccggccttggcctcccaaagtgctgggattacaggcgtgagccagtgcgcccagcttttttttcctttttttggcgaggggatggagttttgctcgttactcaggctggagtgcaatggcgcgatctcagctcaccacaacctccgcctcctaggttcaagtgattctcctttctcagcctccttttacagtcatgcaccacgacgcccagctaattttgtatttttagtagagacagggtttctccatgtttttatttatttattttttgagatggagtttcattcttgttgcctaggctggaatgcaatggcatgatctcagctcacagcaacctccagctcctaggttcaagcaattctcctgcctcagcctcccaaggggattacaggcatttgccaccatccctggctaattttgtatttttagtagagacagagtttctccatgatcaggctggtctcaaactcccgaactcaggtgatccacccggctcagcctcccaaagtgctgggattacaggtgtgagccactgcgcccggcaaggctgtaattctaattcccttctggcctgggcaagacataggtgggacacaggagagagcatgggtgttggaggcaatggcagtcttgactttcaactccttgggtcaggagctccctgtgatggaggctgtcttgttcaccactgcatccccagtatctgccagagctgaccacaaagtaggtgcccaggaaacgtgtactgaaagaataagtgatgaatgagtcctcctggtcctccagagggaccttgggcattcactaactttcagaggggcttgattttcccatctgagaaacaggcaggacaatctgatgccactgccttccttctctgtaacaacaaacatttaccatgtgcttactgtgtgcctcaccctgctctaagtgctttacatatatcaactcactgactcttcactccagccccaggaggttgggacaactctcttttatgggggagaaaactgcggcccagagaagaaagtgacacacatgcccaatgtcacacagcacaaagcacctgagctagagaccagcccgggcagcctggccccagaactctcattcttttttgagagaggatcccattctgtcacccaggccagagggaagtggctcaatcatgactcactgcagcctcaaccttccacgctcaagggatcctcccacctcagcctcccaagtagctggactacaggcacaagccaccatgcccagctaatttttgtatttttttgtacagacaggttttcaccatgttgcccaggctggtcttgaactcctgggctcaagtcattctcccacctcagactcccatagttcagggattacaggcatgagccaccatgcctggctttctcattcttaaacactgtcctaggctgtccctcagtaagaaaggaggtttgggaagcctgccccaaggaagcacccaagttgcaggtggggacatgctgggcaggactgcaagctcaacaatccttctgtggctctgtactgcctgtcaaatgccatcccaaaactcatgcctggatttgaggcccctggaagcagctccagccatgtctcctcctcccagaggtcccagcacaaacctgacattccagcctccctggctgcttctcctcccatgagctctggggcaatcgtgcctctgtgcctggacacacactgtcccctctgcccacaactgggtgcccacaactgggtggtttcattcaaatgtcctctctctccccaggaatccttccctgaccttcccccaacccccaacccaacatgtctcttgccttcaatttcctgtaacactttgccaacaaggacaataatagccaatgtgtattaaacactcctgatgtaccagtaggtactattgtcaataccgttttacagatgaggaaacttaggcactgagaggagaagcaagttgcccaaagacaggtgggatggagtcaggattgaacctacatttgcctgacaaattgcaaagctagacctctaagcccctaaaccagaccacatctcactggcaggcatacaacagatgctcattcaagattccctagtaactgactgccttgggcttccacacttaattgccttttgcacacttaagtatgatctcagagattctccaggcatcacctgctgaatttgcatttttctggtagttatttcagaagtgggcggagacactctcaaggcatgggggccaaatcaaatggtgaaaaataaacaggatcagaagtcggatagatcatgtgaactgagatctctgtaaagtggggattttaattctgatcttcagggtcattacgaggggatgcacagtgccagcatacactgaatgctcaatatacagtaacctcggtcatcacacgaatggctcacgttctagacattattgccgggagtgaaaattggttccctgtctgtggagggcagtctgtatcatctccaaaagcacatgccctcagacgcagcaattcaactccttggtataaactcgcccatgcttgaaatggccatccatattcagggatgttcactgaagtcttgcgagagcagaatatcataaacaatccaaatgtccattaacaggggactggataagtaaattatggtacatccataaaattgaatactacacagctgtaaaaaagaaggagaaagttctttatgttctaacatacttatgcactgacagcatacagatttactgtttagtgggaaaaacaacctgaagaatgtaagagctaaaactataaaactcttagaagaaaacacagggataaatctttgtgaccccggattaggcaatgacttcttagatatgacaccaaaagttcaagcaacagaagaaaaattagacaaattgcacttaattaaaattaaaaacattaatgctacaatggacaccatcaagaaagcaaaaagacaactcacagactggggtaaaatatttgcaaaccatgtatctgataagggacttgtatctagaatacagaaaagattcttaaaactcaatggtaaaatgacaagtaatacaatttttttaacgggcaaggatctgaatagatatttcttcaatagagatatacaaatggccaataagcacatgaaaagatactcaacatcatcggccatcagggaaatgcaaatcaaaaccatggtgagatgtcacttcacacccactaggatggctctaatcaaaaagacagccaataacaagttctggccaggcatggtggctcatgcctgtgatcctagcactttgagaggccgaggcaggtgggcaacttgaggtcaggagttcaagaccagcctggccaacatggtgaaaccctgtctctactaaaaatacaaaaattagccgggagtgattgcccgctactgtaatcccagctactcaggaggctgaggcaggagaatcacttgaaccagggaggcagagattgcagtgagccgagatcgcgccattgcactctagcctggcgacagagcaagactcagtctcaaaaataaataaataaataaataacaagttttggcaaaaatgtagagaaattgcaaccctcatgcactgctggtgggaatgtaaaatgatgtactgatttggaaaacaggtagttcctcaaaaggttaaacatagagttaccatatgacttaccactcctacatggaagagaataaaaagcagaggtgaacacaaaaacttgtacatgactgttcatagcaacatgattcaaaatagccaaaatgtggaaacaacacaaatgtccatcaactgttgaataaataaataacatgtggtatgtccattcaatggaatattatcagcaataaaaaggaatgaagtacagtcaggtgtcaatgatgggacaggttctgagaaatgcatcattaggtgattgcatcgttgtgcgaacatcatagagtgtatctacacaatcctagatgacacagcctattattgtactgaatactgtagactattgtaacacaatgatatttgattttttgtttttttgaggcagagtctcactctgtcgcccaggctggagtgcaatggtgcgatctcagctcactgcaacctctgcctcccaggttcaagcgattctccggcctcggcctcccgagtagctgggccactgcacccggccaatatttgtatatctaaacatatctaagcatacaaaaggtacagtaaacaataatacagtattataggtcaggcgtggtggctcacgcctataatctcagaactttgggagggcgaggcgagctgatcacttgaggtcaggagttcaagaccagcctggtcaacatggtgaaacttcgtctctactaaaaatacaaaaaagtggccgggcgcagtggctcacgcctataatcccaacactttgggaggctgaggtgggcagatcatgaggtcaggagttggagaccagactgaccatcatggtgaaaccccgtctctactaaaaatacaaaaattagccaggtgtggtggcgtgtgcctgtaatcccagctactcaggaggctgaggcaggagaatcgcttgaacccaggaggcagaggttgcagtgagccaagatcatgccaccactgcactccagcctgggcgacagggtgagactccatctcaaaaaaaagaaaaaaaaatacaaaaaagttaggcgtggtggtgggtgcctgtaatcccagctactcgggaggctgagacagaagaattacttgaacacaggatgcagaggttgcagtgagaccagattgtgccactgcactctagcctgggagacagagcaagactccatctcaaaaaataataataataatacagtattataataatttaggctaggcacggtggctcatgcctgtaatctcggcactttgggaggccaaggtaggtggatcacctgcggtcacgagttcgagaccagcctggccaacatagtgaaaccccatttctactaaaaatacaaaaattagccgggcgtgatggtgggtgcctatagtcccagctactttggaggccaaggctggagaatcacttgaacccaggaggcggaggttgcagtgagccaagatcatgccactgcactccagcctggacgacagcgtgagactcggtctcaaaatcatcatcatcatcatcatcatcatcatcatcatcgtgagcatcatcctcatctcatgggaccactgtcatatatgtggtccattgttgaccaaaatgtctttaagtggtgcatgactgtactgatacatgctacaacatggatgaaccccgaaaacgtaagtaaaagaaatccattacaaaagaccacgtattgtatgattccacttataggaaatgtccagaaaaggccaatctaaagagacagaaagcacagtagtggttgtctccctacctgggggagggggtcaagaggaaatgaggagtgaggggtatggggggtttctggggatgacgcaaatgttctaaaattgattgtggcaatggttgcacatctctgaatatatgatactgaaagtcacttaactgtatttattattttttttttagggacaaggtctcactctgtttcccaggctggaatgcagtggtgtaatcataactccctgcagccttgaactcctgggctcaagtgatcctcccacctcagcctccagagtagctggggctgtgggtacacaccaccatgcccagctaattttttaaatgttttgtagagacagggtctggctatattgcacaggctggtcttgaactcctgggctcaagtgatcctcctgccttcgcctcccaaagtgctagattacaggtatgagctactatgctcagcctgaatcatattttaaatgggtgaattgtgtggcatgtgaattatatctcaaaaaaatgctattatattaaaaaaagcaacctatggaacaatgtacaacatattttgtgtaaaactagaaacaaaacccagaaatagatatgcatatgtgcatatatatgtataaaatatctctgaaaggatacccaagaaataacagtgatttcgcccggggagaggaacagggtgactggcaggcagggccagaaaggggactttttctttttaacagtctacgggtacttgattaatttttttttttttaataatgaaattctggcagtgcgcggtagctcatgcctataatcccaacactttgggaggccaaggcgggcggatgacctgaggtcaggggttcaagaccagcctagccaacatggcgaaactctgtctctactaaaagtacaacaattagccaggcatggtggtggacgcctgtaatcccagctacttgggaggctgaggcaggagaatcacttgaacctgggaggcggaggttgcagtgagccaagatcatgccactgcactccagcctgggcgacaagagagagactccgtctcaaaacaaaacaaaacaaaacaacacctttttctggctgggcacagtggctcacgcctgtaatcccagcactttgggaggccaagacgggcagattgcctgaggtcaggagttcgagaccagcctggccaacatggtgaaacccagtctctactgaaatatacaaaaattagccgggcatggtggcgcatgcctgtaatcccaactacttgggaggctgaggcaggggaatcgcttgaatctgggggcggaggctgcaggaagctaagattactcactggccctcagccagaggatgagcttggttggtggctctgagagcataggagatcccctgaggaatcctactttacagtgtgccaagcctgctcacaaccgtcctcagattcctcacacaggccctgccagaaggtttcagcaccgccccatttccaccagcaaatcctgtggcgcgcccttcaaaacaggcctagaatcggctcacttctcaccccaccatgggcaccattctggtccaggccaccagcctttctccctggttcacctggatcactgcagcagcctcctcccagcttccaccctcacccccaaccccagtctgtaacccacacagatctgtgctcacctctcaccactcacccccacacccagggctccagcccactccactggccttctcctggcgctactcaccaggcacttcctgccgcagggcctttgcacttgtccttttctcttcctggaatcctctcccaccagatccccacatggatgttctctcacctccagtgggtctctgctcccatgtctccttgggaacaggaggcctccccacacctatctcaagcagcagcccccagccctagccccattctctgctttatttttctatatatttaacatttacatttagggttcatggtctgtctccccacccccaaacatacaggctccgtggaagatgggattctgtttctttctctagcaccaagaacagatcaatgcacgttgtaggtgctcagaaatatttgtcaaaataaaactgggtcttatgaaactgtcacagaccagaggaggttaaggagacatgacagctaaatgtaacgtagtattgtggttggatcctgggacagaaaatttacattagggaaaaactagtgaaataaaaagaagtatgagttaatagtgacgtgcctggatgggttccttagtaacatcaaatgttaaccacaggggaaagtgggtaaggagtagacaggaactctctggactatctttgcaactttgtaactgtaaatctaaactgaccctacaataaaccatttgctgaaatgttaagaatgtattggatgtggccaggcgcggtggctcacacctgtaatcccagcactttgggaggccaaggcgggcggatcacaaggtcaggagatcgagaccatcctggctaacagggtgaaaccccgtctctactaaaaaatacaaaaaattagccgggcgtggtggcaggtgcctgtagtcccagctactcgggaggctgaggcaggagaatggcatgaacccggaaggcagagcttgcagtgagccgagatcgcgccactgcactccagcctgggcgacagagtgagactctgcctcaaaaaaaaaaaaaaaaaaaaaaggaatgtattggatgtaagtgcaaatgaacaaacaggctcagaggtgaaggcgcttgtcacaggctgcacagccaaacagaaagtggctcatgggcagagagacccagcaaacacctccccaagagaaggaggcccctgtcactgaagatccatttcttttgcaataaaggacaatgttgtgtggggggagggtggagctttccttcccaaatatcataggaggctcagatgcttcattgaggatccacccctggtcctgtatcactcagaagcaggcaccctctcctgggaaaccccccaggaaatcctccttttctccttgcctcccaggaggcccagagggccttgatgagtcacaatactgtttgtcaagagtcattggctctggagctcaggatttcaagccaggtcatccaaatcagggtaggggacaaggaaggggctagggagaccaaaggtggtccaggaagggaggagaaagggacaactaattcatcttgagcacctactaggagctggcatggggcaagacattttagaagtatgtgaccacattccagctcccagccccaaaaggctaactttgattactcctgtttccccaatgaggaaaccaaggactggaaatggatccagtaacaaagcaatggagcagccaaactgggatgtggcctccttggcctcctcttgaaccccactctgtggcctccctgtaccctgaccatgctggcttcccccagctacatctgcaccatgtgccccctctcagcacctggcctctgcccaggctgctccctctgcctgaaacaccctttctttcctggtgttacgttaacttctacttgatcttcaggcctcagctcgagtgttactgtctgttacggcctgaattgtgccccctccaattcatatgttgaagtcctgacccctgttaatgtgactgtatttgtggataggacctttttaaaaatttttaaatttcttctgagagcaagttttgctctattgcacaggctggagtgcagtgctcactgcagcctccattttctgagctcaggtgattctcctgcatcagtctcccaagtagctgggactacaggcatgtaacaccatgcctggctaatttttttttttcatagagatgaggtctcactatgttgcccaggatggtctcaaccccctgggttccagcaattctcctgcctcagagtcccaaagtgctaggatgtcacaggagtgataatgcacctggccaagacaggacctttcaagaggtgactaagttaaatgaggtccttagtgtgggccgcactctaataggaatgatgtcttcccaagaagagaagattaggatacagacgttcacagagagaccatgagaagacacggagagaagtgactgtccacaagccaagaagagaagccccagaagaaatcaaccctgctgacaccttgattttgaacttccagccgccagagctgtgagaatgtcagtggtttaagccaccagtctgttactctgtcacggcagccccagcagactcattaggtggcctccgagaagccctccctgaccctccagacccaagctgagaccctgtgaatgctctttccttcacggcgcctctcatgaccacagtattctgcgtatttctgtgatcatttggttaatggctgtgtcctccatagatggtgacaatcacaagggcacagacggggtctgccttggtctctgcacagtgccaggtgcatagtaggccccccctaaatacatgcggagtgagatgagaagggaagagccagagaggctctgcggcctcgggagctctcctgcctccctctgtgtctctattccccgaccaaaacagcaccaccaaggcttctggaacttttgaacttcaatcctcttcttcagcaaatatttcctttgtggggggggggggtttccctggagcccctcagctctgtcaggctcagttttgtccagcaactttaaatcaaatccttgctgaaaaatgtgaaactcattcctgaagtcagcaaaagacaaggtgcctcgtcctctgctacttgtctctgtccctccttgaaccctgttcttcctgatcccccattccagccctgcccaaatcctgccagctattaagggctacactccaaatttcccttctccaaaagctcatccccgggggcccagagactagaagcggaggctcagaaagggagagagagtggcccaaagtcacacagccgagcagaggctggtccatctgtgaatctcaactctggcctggtcccatctccaggcatatcagcgaaggcatctggtgacacaagtgtcctcagccccaggggaaactgctctacctcctccattcattccactgggcaggtcgggtctgagccgaggtgggcctggcagaggtcctgggcctctgccactgagagcacgtgacctgcccaaggccacacaaccggttaacagtggagccagagctggacgtgccggagccacagtgcctcgccacacggccaccttgctccttctgcaccagcgacgtgactatgcaggaggcagcttgtgtgatattgatcgagctcctgatgcaaagcagggtgggaaatcctaggaatcaggtagacccgattttaaatccagccatgtgattgtgatctcagccaaggaactccgtctccttaggacttttctgcagctgttacagggggttctacctggtggggatatgtgtgggttgaaacaacgtttgtgaaacccgtaacacagagcctatccactacataaagcagggtcaaactgctgagctcattgcataaagtggggtccaccctcacgcatccctgccctggccacgaagcagcctccccgctaccgtcctgcccttgcagtcccattgcccctggagtcccattgatttgagtcccagcaccaagcctccttatcacttgcattgtgatggtgctgcaagtgctcattgtagctaattagaactttctcaacatctccttggtccctatttactgcttatacagaagagacgctctgaaggcagaagcctccttggcctcctgtgcagcaaagtcagagcagccccagccagcctctccaagtctcctcggttgggcatgcccagtgctccagcaggcagaggatggcggagggctctacccactgccaagctctgcaacctcatgcaagccgttaatggtgggcagggggcaaactcagacaatgactagttcctcctagcgctaaaaatgaattttgcacaccagcttttgcctacacatgcatcaaatatctctgcaaggacaggcaagaaaccagtcacaggggaaccttctggaaaggaagctgaatggctgggggaaagaaaaagtttgtatttttaaacttttgcattttaaataatgtgaacacagccaggcgcggtggctcatgcctgtaatcccagcactttgggaagctgaggcaggtggatcacttgagctcaggagtttgagaccagcatgggcaacatagtgaaaccttgtttctacaaaaaatataaaaagtagccaggcatggtggcacccacctgtaatcccagctacttgggaggatcacttgagcctggggaggtggaggctgcagtgagctgtgatcatgccactgaaccccagcctgggtgacagaatgaaaccgtgtctcaatgtaacagtaataatgtgaatgcactgatatttaaacaaagttgaaattaaaaataataaaatctagatttcaagtgaagggattaaaatccccagcttcccgagtttgcacgacctctcctaagggattcccagtgccactgccctgtgtcattgctgctgacaactgacaactggccacagaggagcttggctaaaagtgggagcccaggaagggtcacttcaacttatgggcctcagttcctcctcacgatcaagagagctgctgaaatccgcatcgtaatctaaccctgatttgctggtctcttcttttgatcagatctggggagggcatgaaacattccgtcatgggagccccagggtgtgtgtaggggggcaagctcacaaaagtccaaggggccccagcaccctgaatgagactattgagggcatcaccgctgaagccctcttgttttaccaatgaagaaactgactcacggttctggaaagggactgtatgctgagatcacacagccggctgggtacacggccgccccaccaccccacaccactcatcccctgacagccgtaacggaggattccagctgcaccagcaggtggaggatctggcctggctgtggccctttcctctgactggtggggccagagggtcagcggtgctgggcctggccgggccttgcaggctgtggtatggagtctggtctttgtcctaagagcccctggggagcccctgaagggttttaggctaggaactgatgatgtgtgatttacgtttcggaagatcgctctggctgctggatggagagagggagccagcaggccaaagcaagagccactgcagcctggaccggagcaggggcagcggaggggccgccgagaaccagtgcaagggaaggtgagccgattgcagatggaaaaagtatattcctccttggatagtgtgtcccgtatctccagatgtgtaaactgaggccagatcacatgatggggctgttgtagaagagagctgtagtgtggccgcaatgcccaagattccagatcacctcctccaggaagccttccctggcccccaggcatcccccacgggactaccctgggtcataatcatcgggttctggatttctgtccttccctatcatgaaggcaggggccactgctttcctctctggactcccagtgctcagcaaacagcctggcacgtagtaggacctcatacctcacctcccttccctttccttttccttctatccccacacccctgcctcaggtcttgcatccaggtatccccaaagcccagcctagatgctggcacatagtaggtactcagcagatatttcttgaattggattctcttcaggtcagagtctaacacacagtaggaactcgataaacattcagccctttctcctcaagggcagagtcaatgacaaattgcccagagttactgggagctctctttgttcccggcactgctcggagcacttgaggtaggaatgttattacgttcattttgcagatcagcaaatggaggcctacacaggggagggaatttgcttgggccacacagctgtcaaatagcggagcagggattggaacccaggcccccaggcgccaggactggaatgcatggcctagttctgagggcccagtggctgccactgttcctggcacttagtaggtactgaggtttgtctgtaacgggccccagaaggacacagtcacctccgagctggctgccgccctcctcccaggcgtgggcatccctctcgcctgagtgggccaagctgtcccaagggaccacggccagcccaggcctgcccaggccctgccgcccacgcggcctccctgagccgccagcaggccagcagtgtggcctgccctgggagaccaagcctccctctgcctccagggtggcccagacaaaggcggcggtgtgcccggccccctggcactcgggctgccttcttgtcctcctcctcctcttgctccagggcactcgcagaggttcttttcacaaaggagctggaggatggggggcagggctgggcagccccaaggcaggggaagggagcactggtgaggccacgccctgccaggcctgactcctctcccagccccgtcacacaggcacccagtgggcaccaatcgtggcctgctgaataatgaccattctgagtactgagtgtggccagggtggggccctggcacacgtggacaccactaatcctcccgacaagagatggggtttcacacttaggctgaggaggggagcgtgtcaagggagctattatttccccagtgtagtcaagaggaaactgaggctcagagaggccgagccacctgtctaaggtcatacggttcaaagtgggacaaactcacccccgacccaggtctacctgattgccacagatggcatgctacccgctgccccaactgtcacctaacaaacaattaataataaaaagagaaacaatgaacatttagcaagcatttaatatgtggcaggcactgtgcctaaggcattacctatattaagtgatttaatcctcccaacaaccctatgaggtaagaactgttattatatccatttcatagatgaagaaactgaggctggcaaggtggggcaatgcaccaaaggacaaacagcaaggatttggtggagtgggtttcaacccagccctccagaacctgtgcgccaaaccacagttctatcctggacggctggatgggggacggacagactgacggatgggactgatgattgacagctctgtcccacctgcaccaggcctgaggctgggcacccagtaggagcttagccagcatcggccacaagaacactgggcattctcacgcagtgcctgccggaggggcctcatgtccccagcagggccggagcttgggggcggtgggcagtgtgcctgggctgctgggggggcccaactccctcccgagcagagccacggcggcatgacggatgtgcccgccaccgcggggagcccagggtatagcagttgcctggaaacaggctgctctcgcggcccacactcagacctttgtcaccatctcaaggacctttttttccctcttcctcctttcacgatggagccagaccctgcacgcaggtgagaaaccgcagccaaccccaccagcagccccctgtcaccagggaccatgggggcccttggggcctggttgcgggtggggaggtaggtgggtgccgggaggatgaggggaacctgcagcgggaagtcagcgctccacgggcggcccagccgaggcttggaaaaatcccgacgctggaatgcttctctcactggctttattttccccaagcttccctgacaaaaaacgaggctgagtcctttttcttaatggcgcaatacaagaagcatcagcttccagagccgagggtgtgcccaaaggatctgggcagggctgggcctctggggggcccagagcaggggacaggtgtggtgcccccagcacagcaggcactaattggctctcatgccggtggccctgagaggggattaactgggccctggggaactggctggggatggggccacgccccagccagggttgggcttggggacaggagtgtggaggagcaacagtgaggactctggggtcaccccagcatgggcccaaatcccagctttgtctcttgggcaagttatttgtctcccctgtgactcagttttctcctcaatgaatggggaggacctaaaagggtggttatgagaatcaaacaatataattcgtgtaaagtacctagcacattagctgggcatggcggcacgtgcctgtagtcccagctattcgggaggctgaggtgggaggatcgcttgagcttgggaggttgaggctgcaatgagccgtggtcatgccactgcactccagcctgggtgacagagtgagactctgcctcaaaaaaataaacaaataaataaataaaatatctagcatatagcaagtgctcaatgaaagaccacaggcgcgcttactccgagggccatggggtgcctggctccaggcatgccgtcaggactatttcattctcaccctaagcactcagggaggcaggaagtccacagtccactcactggccataggcagaactgaggctccaggaggaatggcatttgcctagtgacactggggagcatgagatgtcagattgacttccaccccccacccgcccatcaggcttccggcttcactgtctcagccactatctcaacctccccgattagcagtgctgaacgctgaccctgaaaatcagacctcaacgccgcctgccccaaacattcctgggctccccagtgcccagataaaatccaggctgatttgctgggcactagaggcctgtgtgctatggctccgcccacctcaggtttaaatgacacttccatgcctctgcacaggctgtctcctctacctgggacacccaccctctgcttagccccttggtgagcctcagccctagggtatactctgccagaaaatctccccagcccagactccaggccaagccagggactcctctgctccctaccctctgggtagccctgggagatctcctccccggagtcaccagccagcagggagaatgctcccggcctggtatcctatctctggaatctctgccctcccttgacctccacagcttcccggctggcactccttttctcactcagcatccacagccctcggccctccccattctgctcctgcaggaggggcctttccctgatcaccccaagccacaggctgacagcccttccaccacgctgttgctccagaagctactgtgttcctaaggagggcagggagggtggaggggagggagagtagaggggagagagagtggagaaggagggtggaggggagggagggtggggagggagagtggaggggtggagagtggagggcagagagtggaggggagggacagtggaggggaaggagggtagagggagggagagtggaaggagggagagtggaggggaaggagggtgaaggggaaggagggtggagggagggtggaggcagggagagtggagggcagggaggctggagggagggagagtggagtgcagggagggtggagggagggagagtggggaggggtggagggcaggtagggtggagggagggagagtgaggagggagagtggggagggagggtggaggtcagggagggtggggagggagactcgggagggagagtggggagggagggtagagaacagggagggtgaaggggagggagggagcgagcctcacctttactgaatacctgccctgggtcaggccctattctaggcacatggccaaccagtatctcgatgactccatttcatagaggaccgaaaggagattagggttggagagatgaaggctccctcttgcctaagggcctgaggcctagctaggcttttccactgcctgcgctgctcaggtgacgttctggggtccccaagggccatcacagggcttgcatattcctcatgttctctcacctgagccagccagcccaggcccaaggcaatggcagtggtgacaacggcagtaatcctaacactggctgataacgggcaccatttaggcactgggctccaaaacccacataatcctaaacatggagaaactgttgcccagagaggccaagtgacttatgtaaggtcacacagctgacaagccatagcgctaggacttacaccccatgatggaaaagccacgacgtcctagagcctgggacattgcctggtctcccggccaaggtggcagcagcccccaggcagctgtggccccaattctggtcactgggccctaagcgtatcctcggcagccacctgctaattagccaggcggctcctgcctgctcagtggctgctttggagcaattctcccaggaaaggccgagcttgcaggagcaggaaaggtaattgctaatttgcacgagaggagacaaagggacaaaggcgcccttggctgcccggtgcagcctgagccagcttcacatccagagctccctgccacttgccatccaccacggcgggccccaggatgtctgtctgtccccatgacacatccacacagtctctgttcggtgtaggccacccggccgcgccccaggaaggccagaagagaccattaacgtggccctgtcatccttcagagcactgcaggggaggtgtacagggagctaacgattgaaaaagcggatgattcccacgaacgttccagcatcttctggacgctctgcgtgtgttgcttacagaacctcacagccgctcatgggttgataccgctctcagccccatttacaggggagaaaactgaggtacagggatgaagcaactgcccaaggccacctggtaggacatgaaggagccaggattagaactcagcccatctcgctgctgagcttgtactattctatgatctaaattgagactgtctagtttaaggctcccattttgcagcagaagaaactgagggcagaaagctacagaatggaagaagctgggctttggagtcccagctctgcctcgtatgtcctgtgtgcttcaggacacaatcttccctctttgtgcctcagtttcttcatctgtaaaatgggctaggaatctccgagttgtgtgggcactggggaaagtatgtctggcccttcaaggtgctgcacaaaggtgggctccctgattgctccttcgaggggtccagcagcccagtgcctcggggggctgaagcaggtgcggctagagcctggggccaggagccctgtgagatgaggctcaggctgcaggaaccaaggagcagagacttgtgggcagggcccactgtcaagggctgggaggctgggccgtggccaggaaggctggcccagggaggagggggcccgcctgcacgaagcccacctgccagtatctgcctgagctgtgactagcgccctggggcttgggattaggcaggcccgggtccaagccccaccaggcgtgcccctctctcaacctcagcttcctcatgtgcagcccctcacagagctgtcctgaggctcagagaagctgacaggggcgtgcatctggatgacaaggcactgggggccaggctgttgagggaacagtctggagaccccgccctcccagcccagccaggccagacaccggatggacacacaggccgagtggacggtcacgtgaggtacctcttcctcttctcgccgagacctgccccagactctgcctgcctgcggcctgagcttccccaggctctgggcctttcaatatccttacaacagacctcctgtcccaccaagctgtgccttacaaaacctggtcggggaccacaaatctgcaaggcgctattattgcatagcacacatgtgcaggaggtgcatgcatggggctgcttatggtagggggtgtaagggcactggacgatctctcctgccccgcaccccctgggctctctgaaccaggacagcctggtcttagccctccatcagccctgcctcactgtcagcctgggcaagtcacacatcctctccaggcctcaacttaccctctctgtaaactggggctattacttcttgttccatcttcctcatggggttcttagaagactcaagtgataggacaaatttccaacagctttgaaaacaattcagagtcataccagaatgttaagttgttaggttctggttttaaacgttaggcacagtggctcacgcctgtaatctgagcattttgggaggctgaggtgttggagaccagactgggcaacatggcaagaccccgtctctaaaaacaaacaaacaaacaaaaacagaagaagaaaaaaattagttgggtgtggtgatgtgccctgtagtgccagccactcgggaggctgaggtgggatgcttgagcccaggtcaaggctgcagtgagctgtgatcgcaccactgcactccagcctgggcaacagagcaaggccctgtcttaaaaagtaagcaaataaaaataaacatttactgagaagctcctataagccaggcctcaggctgggcacttacacacatgcttcccagagtggtctctgtaagtcccattgcaactcggttctatgggctgcaaaactcctgtccctgttttgcagttgaggacactgaagctcagagagtgatttgcctaagatcacatggctggaaagcagtggacccaggattcgaatccagggccatctgcgaatccgtcactcagggtgaggagctggatgatagtagcctcttttccaagtccccatgggtcttcaaacccactcagcacttttaagatatgggcagcaaggcacctgccccagccccacctacaaggttggcatcactgactcccgtggggacaggctacgagggctcagaaatcattttgttctgaggctcaaggtcctgcagagtaaaatgtggtcttttgattcccaaatacagggggtgggaggagctggggacactggcctccttgcagttcctcaaaccaaccagacacactcctgcctcggggcctttgcacttgctgttccctctacttggaatgtttttccacccaattcccgtataatttgctcctacggggctctgctcaaaatgtcacattttatagctgaaggcctctcactgaggccctccctgacaccctgtttaaaattctaacacctcctgctccaaccccttgagttcccctggttctgctttacttttctccacgcatttaccagcgtctgacacagtgggcctgttccttgtttattgggtactgtcagcctgccctagaacgtcagctctatgaggacagggattttgtttatgcctccagagtagagtgtctaggacagagcagatgcttggcaaatatttgaacaagtgaatcaaactgaggcccagagaggaaagctggtgggccccaggctgcacaggaagtgaaggggcagcatttgtgtcctggccttctgcccagccctgggcatctgtcccctctctttactggcatggaatcagcttggctttgctagaatcaggggtgcaggagcctgggtccttgcctccttcccctcctgagagatctgggagccaacaatgggtgggagaacagcctccgccctggggctgcgtcagggaaacagcaatgtgggtgtgtagaatgtgtccttccaagagaccctggcttcccacctgccccactctccatcccggttcccagaggcaaggctgagaacagagccttcttttctttcttcctcctgatttagggaacgggatctgccccagacacactagctgccatggcgaggtggcagttccttgccttcctggtggcctccatggaggattgttctcccttttcacagacaaggtgctgagggcagaggagccagggcaccatttgtccaaacttacttgggcaaaaccagacctcaaactctgctctggcaagtcagactcatacacttcccctgtgctgagtcccccacagagggaggaaactgcctgctggaagtggcaggtggccatagctgggagcagctgctggtcagccgcctgcctgagcgcacatctgggtgctgccctttgctcacaggggcccttgggcaagtggcataagatctcagtgcctctcagtgttgctgcaggagcccaatgtgcaaacacacacagagcacttagaacagactggcacccactgagtactcaataaacatgagctgacacactaccatcatcaccatcattggtgtgtgccatcacacacaccaccatcaccatcacaccaccattgtcatcaccaccaccaccaccatcatcttcatcaccatcattaccaccaccatcatcatcatcatcaccatcaccatcatcttcatcaccaccatcatcgtcaccatcatcgtcaccatcatcaccatattcatcaccatcatcatcaccaccatcatcaccacatcaacattatcgtcaccatcatcaccatcatcaccattaataccactattgttaccattaccatcaccactataatcatcatcatgacggccatcaccatcctcaccaccatccccaccatccccaacaccatcaccaccatcagcaccaccaccataactgtgtcatgtagcatccgttccccacaatatgccctgaactctgccagggcaagaaccacatctatgggtctcaacagtgcaccccaggaggccctctccaggttgctaaatggataaatgagtgaatgaatgatgaacagttctttgtgcagggcaaagcagctgatgaggaggagactcagattcacccctccagcccctccccctcattcctaaatgggagtaaatctgctcccatttagggcactgccccctagagcctacagcctccctggacctcagactccagtctctgctctgcacacactggaccagactcactccctaaacacctccctccccatgttcttcctgctctacaacactcaatggctcccaatccctgagatctggctttctggggccccactatggggccatccagccatatctccccagccctgcacctcccttcaagccagtttccttccctcctttccaccgcctgtgcccctgcccgacctgggcttcccaacatggccagagaaagtggaaatcctcttgatggggcttgaggcccatgatgacccagccctgctgaccctgccaggctcctgagtctctccgtcctggaactggaggagcctgcttgttgggtaggtcggaccccccttgatgggactgcaggctgcttgtgtgggggaccctggccatctcaccagccctcatgttggccccacaacagctctgcttctccattttgcaaaggagaaaactgaggcacaaaatggataaagacaaggcttgaggcattcatttaaaaaatatacactgagtgctaggaactcagcagtgaaccagacagcaaatattcctgtccttatggagcccaagaggaacacgcacaaaaacacagctttgtcagatgttcataagggctccaaagttagtgtaaggggcttgagagtgataggaaccaacgacattttgaaaagacaatcagggagggcctccctgaggaggtgacatttcagcagagctcagtgacgtccaggggaacagccaggaggccagtgtggctgaaggaaagtgagcaggggccaaggaactggaaagagggaccagagctgggccttgcaggtcatggtgacttttgctcagagagtgatgagaagccacaggagagttttgaacagagaaggaacatggtcaggtttacatttttaacacagcactttggccacagtgtgaagcggggcggaagtaacagggaggacaatgagtgctacagctggggaggaggtgacaagagctggggtaggaggtagtgatggaaaaggccttgcactcccgcactccctagagcactacttcctgggaaaggggggctcagaggagccagacactagggcagcagggctggcatgggggactccaggcagaagccacctcctggagctcagcaagcctggcacaaccaggacaggggctggcttcctgagccaaccagctggagagcacaccagcccctaggctgcccctgacctccagccaggggggtacctggtactcccagctctgagagggcagagatcaagtcctgttcaccaccacagaggcggtacctagcacagctcctagcaaagagtaggtgctctggcaatctttatggaatgaatgacaggacctggtacatagcaggcaccaatcaaaatgtgctgaacaaatcaatgaatgaatggattgcctgcagccctgtatcatttgccggtagtttcttgtgttagtctgagttccttaaaataattacaactgctgtggatcggatcgcagagccttgccaggagccaggccctgagctaagtctcttaccagcatgaaacaaccccaaacagcaggttctattgctaggcccattgtacagaggaggaaactgaggccaagggaggttaattaatttccccaaggtcactctgttactaggcagcacagccaggattcgaacccagggctgggttcttctcagctacatgttaatacctcctgaatcaggatcttatcaatgacaccgtcattcccaactcaactgtaaatcctcctgagggcagggatccctggggtccctgatgaacaaccccaatcctccatcacatcttaggcgctgcgttggctgtccacagcagctcagagaatggcactgccttcccaataaggaacccaaaggcttggagcttgggaacctttccaagaatggtaccccaaaggggcagcggaggaaggccttgagcccccatcttctggggcctggccaagggctctttccatagtacccttccccctcctgtccccacagtcaccctgtgtacccagcacaggcgcagggattgagttcccaaaccacgagccctgtaagcagcagcagctacttcctggggcccagcgggtgtccagaaaacccgcccacaccagaggcccgtctcaaggtctggggccactgggttgaccctgggctgacttcttacctctgcctctctttttcctgaatagacaaaaactgagctttaggacctgcacagggagctgggcatttaaaactgcaagcagggcatgcttagctatatatgcacaataataattaataacaataatgataacaacagcagccacagtgatgatggccaacactcaccgagcactcaaccacgacccttaagaagccctcaatgctcactacagcctccagggaagcaggtcccattagcactcccacttttttggatgtagaaactgaagcacagagaacttcagcaagttgtccaagccacacagcgactatgcagtgaattcaggattcaaactgaggaaccccactccagagccaagtatgttgggcacagaagggagtggactcctccaggcaggggaaccagcgggcagggaatgggatgggatggccacttatcaggtcctagggaactgctggtttgctttttgttattgtgggggtttttttgtttgtttgtttgttttagttggagtctcgctctgtcgcccaggctggagtgcagtggcgcgatcttggctcattgcaacctccgcctcccaggttcaagagattctcctgcttcagtctcccaagtagctgggattataggcgtgtgccacaacgcctggctaatttttgtatttttagtagagatggtttgttttttgtttcaccaggtttcaccatgttggccaggctggtctcaaactcttgacctcaagtgatccactcacctcggcctcccagagtgctaggattacaggtgtgagccaccatgtccggccaactgccggttttggtttgggttttaaatcatgtgcgtgtactgccataaaacaaacctctttcgtgcaccttcacccaccttgcccctcctaggaggcctatctcctcctctccccatggcaccgtttccttcctcacaagaggctttccgtgcttcctccccagccaccaaggcactctctccctgtcctaacccctcaggaggctgcccaagatcatgcactggccacacgtctgctcttggggcagctggtagctggcctgggctgggtgtggggctgcacctccccatttaggccccacccgctgagggcagaggcctggtctcacaggagccggcaggaggctctcccagcctcggctgatgtggagtggccagcggttggctgtgggtctccatgctactcggtactctccctgaactgcagaatctttgggggatccctgagggtgaaccctaccaacagaccctgcttgtgcctaatatcccaaggttggcaccctctgccaggcagattcacacccaactccccagcctgggatgaaccaccatccaagaccaggtaacaccacagaggatcccagaatctaagccttgctgtcagaaggatggcgatttaaggagctgaggacacaacccttccctgtgctagctggagtctgtagtctgcctcttcccagctttgtgctcttgggcatcttacttaacgtatctgagcctccgaatctccattggcgagataaggatcccagcggccaccaaatttggacaatcacatggggtcgtgtgcataaagtgtttagcacagggcctggcacttcctaagcactgggcaatactggctgtgtcatgactgccattgttctcactccacagcagacacggactgaggacttcatgtattccagattctccccacagcaactggaagaagtagctgacgttgctctccccattttacagatgtgagaatggaagaagttaagatggatccaagccagttggtgagtcaggattcgaacccagggctcttgttcccgctctcagtcctgtaatgcacagcctgaactccgtggagcccactgcccctcgcccctcctccccgatgaccagcctctgattggagcagcaggactcccggcctccacttcccaccacctttggcttggcgccgtccctctgacctctggcttccatcaaggccccctctcctccagatctgggggctggggccctgtcaatcctggaggcaaacccagctgactactaccctcctggaagccccccagcccagtttccctgcacaggctctggcttcccttctacctctgcccactgccccttctgcagctctctgctccagtatcccctgccccggactccatgtccgtaaggtctcactgccactggccacgccacaggcataagcagagagcagttcttgtttccgatgctgagcacttgacatggagtctctcttcagctccccaaggcagctctgagagataggtcatactatcgcatccttttcttttttttttttttttagacagggtctcgctgtcacccaggctggatggagtgcagtggcacaaccacggctcactgcagccttaacctcccaggctcaagtgtagctgggaccacaggcatggcgccaccatgcccagctaagtttttttagttattatagagacacagtctcactatattgccagggctggtctcaaactcctgggctcaagtaatcctcacacttcggcctcccaaaatgctgggattacaggcatgaaatactgtgcctggcctgggtccattttacagatgagaaaactgtggctcagagaggggcagcaacttgcttcaaggtcattcagctcatgagtcacagagatccactgaaaccccggccagtctgagctccagagacccactcggtggcactgcttcacctggcttcatcacagcttctagggttactgattccatctcagtcacaatcccgatcacagcttcctttcattgagggcttgactgtccacaccttggtatagatacttctatacaatagcatagaaggaggatataactgaatccatagctattgtcatcccattttacagatgaggaaactgaggctcagagaggggaagtaacttacccaagactgcacagcagtaagcggcagaacctggacccagcccctggctccagacccccactgctctgctgacctgcaggggcctcgaatcaacataaagcctttcacccctagcctgctcctgtctcaacctcaacctccagagaacatccatcctccatggagcctcccagcctgagccctctgagctgcctcccttcttctctcccctcagcccaggcttccctatcaccccacagagagcctcggagccacccttgggagcttcacagctgcctggctttgggatctttgctctgagagaccccaagatggagcagcagcccctatgctgtggcccaccgggcaggcttggttttatgccatcttcccagctaccccttggggtacgggttttatcacccccttatacagaaggggtcagggatcaaagcaggcaagccatttgcccagaaccacacagctgttgccagagttgggatccaaatgcaggactgtccttggccataccgccttctggatgtccctacagtggctctgcccagtcaagagcccctgttgcccggggagacccctcttcacatcctcatgacaatgacaatcccacgagttaaacatttcacatggattcttgcctttagtttttcccaacaacctgcaggggaggggcaatcatcacacccattttacagacgaagaaactgaggcacccagtggttgcttagctgggggcccagcagagcctgtgccttggtttgctaacctgtagaatggggtcataacacagccttgcagggtgcttgaggactgtgcaaggctgtggaagccaggggctctcggaaacacccctgagggctgtcctcagacaaggccggaggcccgattgtgtttttctcgactcgccagcatccagtcagggcctggcctgctgaaggaagggccccatgtctccttgaacatttcctcagcccggggatgccgagaaaacgatgagtcatccacccaagcagaggcctcccaggagcttgtgtcgggtcccagccgggaggggagggctccaagctggagagggggcccgggtaacacgatgactcccgcgctggccccgaggcctaagtcacggggtcccctccacggcctcccaccgccacaggctgccagcctaccggacacccttggatgctgtgccccagatcctgcccctgcgccttcaccccagatctgcaccccggtttcctaaaccactcttcccacccacgaatcccagggttgcctgcgaccctctagcctccctcaccccactcccacctcacctagccccagccactcaaccgctggtccgtcgaggaaacccgtcacgcctttctcccctcacctcactatgcctctgcctggttttccttctccatcgccctcttgcctctcaccacagaatctgagcgttccttctaaaaccccaacgtgaccttagctccctccacgtgagaaccctcctgtgagctccctgctgtgcctgatgcgatgggctcttcagatctctctcctccatctggccccaaccaatcttgccagctcaccccttcaggaccccactgtggttctcaagctgacttggccatttactcatctccactccatctagaatgttcttccaaacatgcttctctaagaaaattggccctgggatccgtcgtacaacgcccacgctgaccccgccaaaaccagtcccaccccccggaatgagcttccctatgctctgctcttgctgaaaagttctttttggacttcaaggtccaggtgaaatgtcactttcccaaggacttctcaggccctgtcccgtgggagggtgggtctgcgccctggggctgctcagggcctctgtgtagaactaggcagttctcagaacccggctctgagacatctgctgaaccaccctgcccagtggggagccccttaagggcaggggctggtctgggtcctggggacacggcagcaaaaaaacacagacgcagtccgccctgctagtgctcatggccttggaggagacagatcctaagcacagaaagtagtgaaatacacataatgtcaggcagggataagggccacagaggaaaaatcaagtagaaaagagagatgggagatggtccaagggatctaaggtgggcctcactgggtgatcaaggaggccctctctgagcaggtgacatttgaccaaagacctgaagagggagaagagctggccatgcagagatctgaagaaagagtattccaagctagaggaaggccagtgcaaggggcctggggcaggactgtatttggcgtgtttggagaatagcaaacaggccagtgtggctgaggccaaatgaacgaggcgagagggaattgagagcagtgggcagccagggccagatcgcgcagggctctgcaggctactgggaaggccttggctcttgctttgagtgagacaggagtcttggagggttctggacagaggagggagagaacctgacttggggtttccaaggtttcctctggctgtttgtgggaagaaggggttatgtgggcagggaacagggtagacacagggggccccggggagaggcagccacctctccaggcttggaccaggctagaggcagtggaggccatgagacatggtagaatttgagatgtgctttgaaggtagaaccaacaggatttgcaaatgggttggattgggagggagaggaggtcagagaaaggggtcggaagtgactctcaggtgtggccgaggaaggggaaggctgcagctgctgtacaggaagggcagcgaggaagtgaataaatgaatgacctgggcttgggaaccagtggctcacactcagctctggagctcattgggaccttgagtgagttccctccactctgccttagtttccccatctgcaggggaggagctccatgtccagggtggccaagaggactagtgctccgggatccacaaccacgtgggtgagaggatgggcccagcctcccacctgctctgccgtctccccactccccacgactcccgtctgctagcccagcagcccgcccaggccaggcctgcagctgcagttgaaatcggaggggaagagcatggacgagaggcagcaggggcatccgtctcccacaaggctgggtctggccaggtgggagggcagccttgaggtctagaaagcttacgtggggtgccctcactaaaggcgagagggcaccatgagccaggggtgggtggagagctagggcacccctgctgccttcactcccgggggtcctcccgtgcccctgcctccaggctctggggtttggagggtcagacagagccctggagctccagcccagctgtgtgttcactgtgggccttgaggaggttccctggcctgtctggtaccaagttctcatctacttcacagaacccaggggagattaaatggaataatgtatctggcacatggcaggggcttgaaaaattgggagatgggctcagacccctgccggagggaggcagtcattacgccagccattgtgtgttctcctcacaaatccagaccccaggaactcaggttcccagccagggggccgggcgggggtggcgtccatacaggagaagggcgagaggcttgtccctcttctcagcaggtgcctgccaggccttgggaaagccctccagcgcccttccttgacctctgggatctgacacctgggaagaattcagaggcagggagatcactggagccttctgtatgtcataactaaacataatgaggctcactgcagggcaggaaccagtcagggcagcaagagaccctgagtctgcaagttcccagctctgggggctcatgccacatctccatccctcaccatgacttctggtgccaggtgcagtgcccactgcctgtaagcccaactacttgggaggctgaggcaggaggatcacttgagctcaggagtttaagaccagcctgggcaacaaagcgataatctgtctcaaaaaaaagaaaagaaaaagccttctctgttcaattcaatgcaacatttctcaggcccctgatagtactggagacacagaaatgactcagatacaacctctagggaactcatagttgctgcctacctactctatgccggggacttggctgggtgcctcgtctccactgtaccatttaatattcacaacatccttcatcaccattcccattttccagatgaggaatattgaggctcagtgagatcacatagcagctaacatttcctaagatttgctacatttgggggccctacgtgcatgaaagcattaatttccacatcactcctagaagaggaatatgattacagttccattttactgatgagaaaattaaggccatgggaggcggaggttgcagtaagccaatattgcgtcaaaaaagaaagagagaaaggaaggaaggaaggaaggaaggaaggaaggagggagggagggagggagggagggagggagggagggaaggaaggaaaattaaggccaaactgataaaagggcagagatgggatttgaacccagggtcctgtagcattaaagcccaggccctttacctgttctctacatcaaagtggactcaagagttcttgttctaataagccactggccctggtgggtgctgtcaccaacttccagctgcttctttacctgctttggggcccatgggcctagcctcgttctctgttttttttgagacagagtctccctctgtcacccaggctggagtgcagtggcatgatcacagctcactgcagcctctaactcctgagctgaagtgatcctcctgcctcagccttctgagtagctgggactacgggtgcgtgccaacatgcctgagttttttaaaattttgcatacagacggggtctcaccatgtccccaggctggtaggcctggctttgacatgagtgagcagggtggcctcaagcacattccttagccaccatcctcaaatgacagcagagccttttccagtttgccaagaagtggagttttagagcccattttccagaaaaggaaactgagactgagagaggccaggcaggctacttgcccgtggtcatgtgggaattaaacagttgagttaggaccccataggccctggccccctcacttcaagttcagagccttttctcccaggaccttcccgccccatgcttggctttgggctttgttataggaccatagcaagaggcgggtagggggtggcagtgggaagctggaacaaggagatgccttggctgcagtcatggggacgggggtatggcaccacctcttatggccacctcttggcttcagccagctgctgagactccggggatggcaggggccagggcagcagctcaggtgacttggtgatgatggaggacatcccaacagcaccacactggcagacagacagggtgagtccaatccagatctcacatgagtgcaagcacacgcagtcacacccgcagctgccaaggcccacagcccaggtgctcacatagatgccgacaaacacgcagaggagcctctccacctgtgccctgcacacactccacgcacacacacacaagcatttccagcctgcacatagataggaacagcacactcacacccacacagttgcacttttacacacacacacatgcacgcacatgcgtgttctagcccgtgagcacacacatgttcaggattcagtcgcacaacctctgagctaagatctggcttgaagaagcccaggtatgcctgaggccctccacttggtccccagacacccccagccacaggctccccaccccccaatcctcccagcagcatttctgaggtcccagatgggccttccagcctcccagacgtgcagggacgacaaagcagcctgcaggggccataaagcagagggttttcctaccagctcctacccagggaagaagggtgcacggtgtccccacccctcagcagacagtgacccaggacttagaggggaggccccaggaaggcagagcctgacctgtctgcatcaccctggcaccgaaatgcagccccccagagttacccaggaccatgccacccaaatcacaacgtgtaactgacaaaaacgcacgctctgccactcacaaaaaatgcaaatggagcctgtgccaggcatcactgtcaaccttcttccaaaagcccccccaggacccaggacaacagaggcatcctccctcctccccaccccacacccatcttcatgagccctaggaaagcccacagactttatgttgtgccagtcctgcctcaggcagcagcctgtgaatacagacctcttgaccagagggatgctttgaaactaattcagactaaagtgtaatggactgaaagcttgacatgaaggacctgtgctttcaaattggatcaggttgcaagacccttcaaagtcagaatggagatgtatgcaaggccctggcattggtgtggactaggggaagttctgaacctccctaagcctcagtttactcatgtgaaggtagcagtaatcacagcactggcctctaggctgctgtgagaattccacaagctgatgcgtatcagcgcctcagcccagtgacaggcacacagtaggtgacccccgaaacagccgctatactgataattcagagaaaaccaggaaatattgagggactcaaccaaaggtcacagcacatattacgcggtgctaagtcagaggccatttcccgcccagaccagcggccgcaggtgccaaaggtttacacaaaagctctggggagaaagacttaggcctcaaaatgctttccactaaatgaacgttgttgcaaactgggaaaagaccaccattagtcaatttgggtagtggaacacctggggtccagcttgcaaaagcctggttttgagagtggagtttggcaatctcgaagtttcccttggggaatggggctctaacggtgggattcctggcatgtggcaggtccacggagaagctacagcagtgcacagagaaccctgttccagtcctggctctcaacaaatggaaacttcctctctctaggcctcagttttcccatctggaagatggtacagttgggctgagaacctctatctctccacggagacttggggctctctgatcctaggaactgacagacagcccagggccccacctcagccgtaacctgtggccctcgcaggctctggggacggctccacgcgctccactcagagaggccagaggaaaaggaaaggggttgttttactttgtggccaatgccggaacggaattggagggtcttgtctccaaggggtttgcttcccccgcttggcagcccacaggcctggagcaggccaaacgtaagaaataataaatcctcaccaggcttcacccggccaggaggcccccagctggctcttgtcataaagagatcttatccccaccagcacccctagctgcccgtggaggactccgccctcctctcctccataccctgcttccaccttctacttcctgtgacaacctgcaaactggaggccaacttgcctctcccccacgcccaggcttctcctcgacccccgccctgccccacccccacttgggccccagctgcaggaggccctgtggagtgtaattcccctcgccctctctctgccctgggcccgtccggacagattaagcctttgtcacacacacccagaaaagctcagggccagatgggacaggacaagtggtgtcagatcatcgacccgaggctggccgggactaggagagggccctgaccacagcaccgcatatggctgtgggaggaggaagggaggcccagggtgggggcagccagagagcaatggggaagagaggtgacacaccatggccaccctggggacagaggctatatggggcctgtctgctggatgacccaactcccacctcccttcttccttggaatctttctacctgctctctcttgaagcccccatgggcttctttatcctgtcctcagctatgcccaccacccccgacagctgggtgacctgggagcaggcacacagccccacccacccgagcaccccagtgcccgcacaaggactgtgggtactaaacaaatgcttttgacaaaggtttatggcccaatgaccttcacaaaaacccaccgaggaccaaactacaggctctctcccaaatgacaccaggggtgagggggtgtgtgtgtgtgtgtgtgtaggccagggagacgtcctttgcacctttcaaaggaggtcccattcagcccctcccaggaagaggccaatggctgccccagaattcccagcaggatttgttcctcttggatcagtgaaaaggaaaatggaaatataaaaataataactgggccccaggaaagaacttggagatgggggtggcatctcctgcctggctccggctggctgggcgagtggcaggtaactgacgggctctcgggaccagcaggccaggcaggcgggcgtggggagcccgaggggcgggctgtcgagggagggcacgtctgttgtgtttgtcgatctcctggcagcctggactgggaggcctgggtcccctttctctgcctcccaggcaggtggtcccttggggagggctcattattggtctgagagccagggtggagactggggacggtcgcgctgccaggggcaggcagagcgggtcagcgtgggtctcaaggagcatctgaagccagcagctgggccggcaggacctggggtccaggcccagcacccagtttctgcatgtggcctggatagggggagggggtgctcagcctctacagctgtgtggataaagagtggacgactgctccagatgcccactccctagggagaagtcgagccacacagaaagccagtgagccagctgccaggtctggggggtcaccccccaactccaggagagggtggactcagggctcctgcctcagactaagaaggttgggccaaggcttccagctcttcagggaggtgtaaccaggatgggggggtggggtggggcaccgacccgggaagccctgatggcagagggcactgacctagggtagggggcaagacccagccaaccatctcgtgggtcactgacctcagaaaaaccgccctccggcggggggcagtgacccaagatgggagaaccgaggaggggaccgacctggcagggtggggagggctgacccatactccccatctgggaaagtggcactgatttgggctgggggaggggtcctggactcgatcgggggaggggacaatgacccagactcgccgggtttgagcgagagtgctgatttaggctgggagggtcccagccttgcgcgggctgggtcactgccccagcttccccctcggggagcccggtcccggcgcgcccctctgcccggccccctgttcccggtccggccggaggcggcagcggcgcagatgggctgctggcggccgcagcgcggttatcagcgctcctcgcagatgggccgcccgccctccgcgctcgcggctcccactccccgcggcctgcagccccgtcccctgggcgcggggggaggcgcctccggatctgctccccggctcccgcctccctccctcgcggccccctcaccccgcgggcccggcccgggcggccgcggagggggagggggaggggacaagtgcacttttcgtaacgaccgaatcaattgtgtgtgaagagcccgctccggccggggacggggctgagcgcggggcgggcgggccggccgggggaggagcgcggaggggggagcgggggagcgggggagggagggaggccggcgcggggcggcccggctctcgcgctccggccggggagggagcaaggagggcggggggaggccggcgcggcccgaccgggccgggggcggaacgcactaatggagggtctcggcgacggaaagttcaaagctcagcagcgccccgggagcggccgccccccccccagcccccaccctctgcagaacaatgaggtcccggcgggggagccgcggggcccgcgccgcacgccctctccagggcgccccgggccagaggggacgcccccgcccggccgcccgcctcctccctttaggcggctgcggttccccgccccctcccccacgccaccccgcccggaccgggccggcccgggggacgggggaggggaggggatggataggtcaggcctcccccgtcccatgaagggggaacgaggggcccggggggctgagggggcgccccacccacccgcgggaggctgctcctgcgccaggctgcggctccggccgcccctccccgggccagccccgggtggggtcggggcgacagtgcccgggcgggccccctcccctggcgctgggaggcccggcggactccccgtcccgcggctgcccctgcctccctcccccccccccaccccgcggcaccaccctccgcgcgcgcacacacacacacacacacacacacacacacacacaccgcccagccggcccgggggcgggagcgcgaggcgcccgggacaggcagccccggggcgggcggggggaggctcgggctccagagcagccgcctgctggcggggggaggggacaagaggacggaacatgctggggtgagcagcccgggacagcctgcccggcacggccacggcccgggcagcggcgcggaggggggcagggacgccccgaacccggagcgctgcccaggcgagccgggaagggccggtgagcagggacgcgtgcgcctccggcgggcccgacacacggacaacctcagggacacacgttcggacacacatccacacccccaccccgcccccgcccgcctgccccaagccccgcggcgggacccgcccgcggccgccgcgcgcgcactcaccgagcccgtcttgaccggcacatacaccacttggcccatcttgggttcccggccgctgcccaggcggaagcccttggagcgcacccagaactggaacttgcctttctcgccggctgcggggccgctgcccgcgccagtcccgccgccgccctgcaggacctcggcgatccgctggtatttgctgcgtgtcaccgtcttggttttggccgagtcgccgtaggtgcgcaagcaccagtcccggaactggcggcccagctccgagtccccggggctgcgctcgcgctcccagcccccgcgcagcagcagcgtcggcttcggcatcctcccgccgcgcccggcgccctcgggggcgggccggccgccgggccgcccggtgccgggactgggctgggctgggctggaccgggccgggacgcgccgcggccgcgtctgtcccgcggtgtggctccggcgaggctgctggatgggcgcgggcggcggccggacgcgcggggctgcggcgcgctctgtcctgctcgggcggcggcggcggcgttggcggcggcggctccggctcgcctcctgctccgcctcctcctccccccggccgggatgcaggagcgatggaggcagctccgggcccggaggtgcagagggggcgggccgccccgcgggcggccgggggaggcgggaggcggggagcggccccgagcgctgggagcgagaccgagcctgggcgcgggcggcagcagtggctgtcagcttgcgcggctcatcctgctcttgctcaggctcccgctgccgcggctcttcctcctcctcctcctcctcctcccgcgcccgcctccaccacgccgcgggatcccacctgttagagcggcgcagccttcgccgccgcccgccccccccttcctcctgcgcccgcccgccgggcccagcccccgcccggcccggcccctgggggcgcgggggcagccgcgcccgcagccgccgggagggcaggaaccacaggcgcgcagtgcccagcccaggaaccgcgttccgtctggccgggccgggcccggagcttcgcaggccccgctcctcccggacgcggcggtcccgcggggagtagggcgcagaccccagcccagacgccgacctcccggccgccccgccccacttagccaggccgggaaggtgtagggcaggctccccctccctcgctcccgcaagtgacttgacctctcccgtgagccgaagccagaagagcagtgttcccctgggggaaccccacatcgccgcccttcggggcccccaaacttcctctccttttgcctcaccctgaattccccgaagtttggccagctttgcctctgcttgcctgccccactgctctgggacaggcccaggccccctgggaagtcgcctgtggcctcagcccaatcccacctccgcttcagaaaactctcaacacatccacaaactcatcctgagacaccctgccttcctgagtgcgccttgacctagaatctcttgctgagtaaactcaggtagccccaccgcccccctcctacctgggcagatctgaccttgggtagagctagctggtcccctcccccttaatgaaattaccaacataaataaaggcacaggccaattccccaggatttctgtgcccctaccccccacttccttaacaggtcatgaggaattgctgcacttctctcccagctgtccccgggggtccaccccatgtccccatgacactcctgcaggcaagtcaccatccaagtcctgaggcccagactttgtctagtgcaggaccgtttcctgcgtaggaactactgtctactcccatcccaaagtcccccaccccaggacctactacgtgccatgtcctggcaactctgagaggcagagggaatggctccattttacagacgaagacctggggcttggagaggtggcctgacctgctcaaggtcatgcaggaaggaggggtgggtttcagctcatgtgcatctggctgctgctgccatatcacacacaaactcttcccctttcaccgcgctcggagagagccccacgctgtgtatacctggctcacttcccccagtagacagggagctccagatgctcagggccatatctgacccatcctcatatgcacaggccctagcacaacacctggcacacagtaggtgccagtaaatgctgaaagaaccctagaggtctcccaagccccaacctctctctgcatttcacatgggagattatttttagataatttacatttcatgttactttatatacaccaacaactccacagtcatttttcctctttatcttctcaagagctctttttggatctatgctggtatgcatgcccgtttttaagaggtgaccactcagagcggggaaggcactacccaaaggccagccccaggggcgcaggggcttctgtgattaagaagctcagaccctgactttttccatgtgtcccttgacggttatccttccagcacactcttcctgagagcagagatgctctagcctggcaatggtaatgataactgtggcaaatatgccctgtgcctgggtggtggggtccttgtgtgagccctggtctctctgtccagttccaggacccacttcaataaccactaagccggaccacctctccacccaggctgggtctttgcctgcctttcagaagctaaaaacctggttgtcaatcttgggctgagttctggcacagcagaatgtatagtataatgaaaagaacatgggcttcgggtggagtcagatttggaagtgaatcctgatgattatttggcgtggcattcttcatgctcacaggtcccacttggctacttcacaatggaatgaagccatcattccaccctttgctgggtaacctcaggcaggtcactgagcccctacttcatcatctgtatagcgggacaggatgtcacagatgtagagattcaacaggatgagagtgcctgagctgtgacgggtgcccagtaagtgccattttctccctcatggggcctcgaagtattcaaggaggaagacaggcattgttggcactttttgtgcttcattcattcaacaaacatttgtttagcagccattgtgcagcaggggcttgggatatggtcatgggatccccaaggtccctgccctacgggagtgcaccaatgggtatggaagatggctattgaacaaaccagctattgatcacaacagcccggggaatgggccacgaaggaaagagagagctgtgatagcaaataatgcaaagaaggggctgcttttcttagggggatcagggaaggcccctctaaggaggtagcatctgagcagtgacttaaatgacaggtgccaaggcatgctgttcctgcattccaggatgagggaagagcaagggcaaaagccccaaggtggaaggagattggcattttctagaagctggaaggtgtccagtgtggtgagactgaagtgagggaggaggggttggagggcaggagtcttgaagaccctgggaaatactttggatggcattccagctgctatgggagctactggcgagttttaaacgagcaggactgtggggtagagaagaagtgaggagaggagggcagctgcaggggtccagaggtctgtggtcttggaggtcagaggcctggaggtgtccctactgtgtgacagctcactgcaccaggcacgtcccagcctcttgccccaagggctcctgggagagtggaacagccaaggagtgagaacagcctactgcggcccatccccacttttgcagaaacagaccctgggtcttcagcctatccgtgtcactggggtcctttaggaggggcatgctgggtggggtgtggggtaagtctcccacaatgcccaactcctggggggatgcaatcacggtcccagggggcagctgctcttttttgatttccattccagacacctgccaaaggaaaaagtaggctgccccatgaatcaaaggccaggagatcctctgcatttttaaaaattttgagacagggtctcgctctgtctcccaggctgagtgctgtggtgcaattgctgctcactggagtctctacctcccaggctcaagtgatcctcccacctcagcctcctcagtagctgggaccacaggcatgcaccaccacacgcagctattttttttttaattattttttgtagagacagagtctctctttgttgcccaggctggactcaagtgattctcccgccttgggctcccaaagtgctgggattacaggcatgagccactatgcccggcctctggatttttttttttttttccacacttcgtccaggtgtccaagggagactggagttgaagcacagggagtccaagcccccagggctcacgtcctctctgaatacagatagtaacgtaatcactcctgggctcaagtgattctcccgccttggactcccaaagtgctgggattacaggcatgagccaccatgcccggcctctggatttttttttttttccacacttcgtccaggtgtccaagggagactggagttgaagcacagggagtccaagcccccagggctcacgtccactctgaatacagatagtaatgtaatgggtcacaagagcttggtgatgaagggttctcagagtatacagtccaaaccctgcctctgatagatgggtaaactgagtcccacaggagcaaagaggctcagggccgcaggacagaaccaggtacctggcctttgcctgatttggcccagatcacctgcctttcactgagctctgaccctgggcccagatgagcggggatgcctgcaacttgacagtgaggtggccctgactgtgccacaggaagttccaggcctggggtggggcagagtgactcaggctcccacagaggcctgtccacgcaagggccaggaagagcagagaggccccagagccttggggagaggtagttaccaccactgggtgctggtgccccttctatcaagggcttgtgccaccacctgccatccccctattctatagcatccccctgcagtctgccagccatgctgagccgctgctgtacgcccacctctctagaaaggcctcctgacctctcaggttgggtcaggggctttctctggtcactcatagagccttgggctttccccctcccagctctgaccacagcatttcacgatggcctcattacctgtgtcgaccagtgcccagcacaggagctaaggcttaaacgttattgaataaatggataaataagcaaccaaccaaccaaatgaatgaatgaatgaatgaatgggcttatcctcaaaaagcaggtgctagactgaagtctacagcattttccaccatgctactatgcttcctccataatcaatccatccatcagcatttattgtgcttctcctaacaggctctgctgttgagtgactgagtcccttaatctctctaagcctcagtgttcaatgccgataaaatgggaatattaataattatccctaactcacagggctgtcgtgagaataagcactcaacaaatgctagctcctattgtcattatgcccatccatcattcagacgtttatttgggcatcttctgtatgtcagccaccatgcttggtgtttggaatacagtaataaacaagagggacctgacccatgaagctcagggactagctgactttcaaaagatcatgacaggccaggcacagtggctcacccctgtaatcccagcactttgggagaccaaggtgggtggattgcttgagcccaggaattcaagaccagcctggacaaaatgtccaaaccccgtgtctacaaaaaagtacaaaaaaattagccagcggtggtggtgtgcacctgtagtcccagctacttgggaggctgaggtggaaggattgcctgagccctggaggtagaggctacagtgagctatgattgtgccactgcactccagcctgggagacaaagtgagactgtctcaaaaaagaaaaaaaaaatcataacaaatgggtttagaattaaaaacaaaaagttgccatgaggctgggtgtggtggctcacgcctgtaatcccaacattttgagaggccaaggtgggcagatcacctgaggtcaggagttcgagaccagcctggcccatatggtgaaacccgcccccgcccactaaaaatacaaaaattagccaggtgtggtggtgggcaccggtaatcccagctactccgcaggctgaggcaggagaattgcttgaacccagcgggcagaggttgcagtgatccgagatcataccacttcactccaacctgggcaacagagtgagactctgtctcagaaaaaaaaagttgccatgagaacacatggcaggggagcggggcgcccagatcagcaccttcgagaagtcccactctaagtgccctaagggtcctttggaccagaagatggagcactgggcaaagtggaggggaggagaaaagtgtctctactcctgcagtggcccgcgccacactgcctgtggaattacgactgagtgggaaaaaattctgtccaccttgcagagtttgagacccgctcgagtccagcatccccttttttccagaaactaaagcataaagagataagagaactaatttgtcgagggatttcattcaaatgtcacctcccctgaggagccttccttgactgcccttcttaaaagtcccccagtggccctccattcccgttccttacttgattcatcctcatggactcagtgccaccttcctttataatacatatgtatttgtttcctgtctctgttcatctcacctactggaatgtacattcctagagggcagagctctgtcctgttcactgcagtatctccaacatccagaacaatacctgacacgtagtaggtgtcccatatgtgtttactgaataaatgaatgaatgaaaatccctgagagagagagagagagagagagagtgtgtgtgtgtgtgtgtgtgtgtgtgtgtgtgtgtgtgtgtgtgtgtattttgactatacactgcaatgagatccaggaagatttctgctgaattggagaggcaggggccttttttgcttatattcattttgtctttggcaagtcacttcccttcattaagcctcggtttcctcatctgtaaaacggagctagtgcctgctttgcagaatctttgtgaagcgtcaatcaaatacggtgcaaagtgcctaggtggggcctggcacacagtaggtgggcaactctgtcattttgatggagcccttgttgggggaggcctgtgaagggggatcccagggcctgagcctctctgcaggacacaaaggaagctgacactggatctgtcccgtcacctgaactcaccagtaatttattgatgctggatgctggcacccagcagcctgctgggtcagtctcagggagcaggtgtagggccctcgggcctaccccagcctcacccaggcagggaggggaggggagcctgggtctgcccagcccaggaaaattgataggtcagcccttacaagtcagtccccttctgtgtgccaggcagtgcaggcagaaaaaaaaacaagtgtggttcctgcctggcctgagctcatagagggttgaagtggacatatttcaaataaccaaaatggtgagagctgcatgagggcctactatgtgccaagaacttcgtacctataaccacatttaagcctcatacagggcttaaatgtgctgaggtcgcacagctagtggtggggcaagaggagggtttgcacccagatttgcctggctctaaagccagggcacattactgccatcccgccccactcaggctggctgggccaatgggcattaaaaaaaaaaaaaaaaaaaaaacgggcctggcacggtggctcacacctgtaatcccagcactttgggaggctgaggtgggtggatcatttcaggtcaggagttaagaccagcctggccaacatggtgaaaccccatctctactaaaaatacaaaaattagccaggtgtggtggtgcacgcctgtaatcccagctactcgggaggctgaggcaggagaatcgcttgagcctgggaaacagaggttgcagcgagctgagatcatgccattgcactccagtcttgtctcaaaaaaaaagaaaaaagaaaaaaaaaaacactaaaaaaaagctcttggctgggcaccgtggctcatacctataatctcatggctttgggaggccaaggtaggaggtttactttaggccaggagcttgagaccagcctgggcaacatagtgagaccccatctctacaaaaaattttaaaaattagtggggtgtggtggtgtgcacctgtagttccagctactcaagaggctgaggcaggaagattgcttgagcccaggagttggaggctgcagtgagctacgattgtcagaaatctggtcacaatcatagtggtcaggggggcatggagtgctttcagtggccactgcattccagcctgggtgacagagtgagatcccatctcaaaaataaataaataaataaataataaataaaaataaaaaggaagagctctgggagttgaaaactgagagtaggtgctttccatgggaggcttccttaaggctgagacctttaaccggccttcagcgggtagatggagataccaaagggtgagtgtgttttaggccagagaagcagccgagtggaggtctggagggaaaagggagcgatctgtttgcactgtggtgggcatgcccacctgggagagcaccagggcccagcagtgggcatgctggggctctgaatgcttggctaagccttgggcctccctggtgggacatggggagggagccatgggaggctgctgagcaatgaagccactgtttccccctgacctatatattgtaagaggcctgctagtcaggccagagtgtgcctggccttcgagaacctctaacatctagcttcagcctcacctccctctaccagctctctggacctggcatgtcacaggcagccaaacacttacggctcattctcacctctgcacctctgttctcttggccccttctcctgcaatgcccgctctgtctacccagaccctacctaattgctcaggtcttccttccaggccatttcctccatgaagcctgccctgaccacaccagccctgagttacatgcctcagcctcagaaccgccgggggcctgggctgggaaagtgcccatcctcctctcaagtccgcggcactcgccatccaccaagatgggctgctgcttttacctgcatagcaactttcttctcctggtaacagcatcttgaaatccctttgagaaaccgcctccttcatattcagagcatgttgctggagccatactgacctgaccactgaaagcattgaatgactaggccactgaaaccatcccatgccccaaccaccgtgagtgtgaccagatttctgagaacaccggccgggtgcggtggctcacgcctgtaatcccagcactttgggaggccgaggcaggcggatcacctgaggtcaggagttcgagaccagcctggccaatatggcaaaaccccgtctctactaaaaatacaaaaattagccgggtgtggtggagcatgcctgtaatcccagccactcgggaggctgaggcaggcgaatcacctgaacctgggaggcagaggttgcagtgagccaagatcacgccattgtactccaggctgggtgacagagcgagactccatctcaaaaaaaaagatttctgacaacaccctttgagcccctggattcaaccacacctaaaggcccttttcttcttcacttaggtctctcagtgctggatttcctgcaaccccatgagccctgacggatgtaccatttgttcagtgcagtcagaccccctctggtctggcccagatggctgtaccagcctcctctctgcactcctggcctctaggttttcccttctggtacaccagaataaagttcaaactccttggtgtggcattcaaggcctttcactatcttgttccagcctctacttctctctgtgccaaccacactgaaccttccattcccctgaacagcaagactgcgttcagacttgttcggatgctccttgacttacaatgtggctaagtcctgataaacccattgtaagttgaaaatatcattgtaagtcagtcaaaagtgcatttttttgtttgtttgttcagttggttggttttgtttgttttgttttgttttttgagatagggtctcactctgttgcccaggctgaagtgcagtggtgagatcacggctcactacagcctccacctcctgagctcaagcgatactcctgcctcagcctcccaagtagctgtgaccacaggtgtgcgccatcatgcctggctaatttttgtattttttgtagagatagggttttgccatgttgcccaggctggtctcaaattcctgggcccaagcgatccacccacattggcctcccaaagtgctatgattacaagtgtgagccacagcacccagcaaaaatacgcttttaacttaccgcatttccaacttattctaacagtgggtttacctggatgtaactcctttgtagtcaaggagtatgctgaatgcatatcactttggcaccatcgtaaagtcgaaaaattgtgagttgatcccttgttaagttggggatcacctgtatatgcagttcccctcaatcactgggactgcccttccccaccaattctcttcctgaaaaactcctactcatccttcaagatcccatttgattgtcactccgtctgccatgtttcccttgacccctaggcagggtaagatatctgttctctcctggcacctcaagctccctggctggtctccttcatgcagtgaccacctgatgtggttattctcttccacctggctaccttcttccctgacaaggagctactcgaagacagggtcatgtcttgttcatttttcatctcccaaagggcctattaataaatagttgtcaactgactgacttaccgacagggcactcaatccaagttcatattcctgaaatccttgcaaaccattaggtaactatttttgctggtcaccttttccagttaaccactcactgggttttctttactgcaggacttctcagaggcattcacgtgctaataatagcacttcaaccctccctgaaagggagagaatgccaaagctggcctaggcaacggtttgaggtcatctggtccattttaggaatggggaaactgaggcccagaaagggacagagactcatccaggcacttgatggcagatctgggccctcagtccagccttgtgtcccccagtgccctcctgtctacatcccactgcctcaggcccaaaacgttaagagtgagggctctggagccagactgcctgcatttgagtcttgtgcccgctctcaccagctgtgtgaccttgactgagtgacttagcccctctgagtttcaatgtcctcatccataaggtgttgacaataacagcacctcctttatggggttgttgtcagggtttaagtgaagtggtccacataaaagcacttagcacaggctggggacggcagctcatttctgtaatcccagcactttgggaggccgatgtgggaagatcacttgaggccaggagttcgaaaccagcctggccaacatggtgaacccccatctctactaaaaatacaaaaattagccaggcatggtggtgggcacctgtaatcccagctacttgggaggctaaggcaggagaatcgcttgaacccaggaggcgcagggtgcagtgagccaagagccactgtactccagcctgggcaacagagcgagactccgtctcaaaaaaaaaaaaaagcacttagcacagtgcccggcacatagtaggcccccggtaaattgccaccagcatctctataaccttagatttctcaggaaatagcagacacactgagccttgacatcttggagagctgtggttctctctggagaaagatgccaattaaataccaggtccaggctgggctgacctcccacatggggcctgctcctgtggaagcccagatgttgggccttcctcctccctgacttgaaaaaaaggtggtttttgtttagaggaattttccctgcattttcatattggctctataagttggattttgttgagtggtttctgacaagcaagttgtacaggcatgtatgtggaggagacgcaaggctgcctgtagccatgggggtggatctgaggccttgagttctgccagccactggccatgagctcagcccctggacagctgcatcccagggagagtgtctgtccttggggtgatccagaagggcttcacccctggggaattcttctagaggtttcccagaaccttccctcagaggaaaggctcactggcaaatggcctgccaccttccccaccccaccccagcaaactcacaccctgggttcaggtttgtggtgttgtggtgggggaagtccctgagtctcctacccccagctcagtccccttcaagatggatagtcagggaccaagaggtggaacacggagcttctccatatcttcagcaagccaaataagaagctaacatatgaaagcaagagagatttcagttagacagcaggagagacttctgccctgccagatggctaaaacctgggctgtgcttggcctaggaaagagcactaagctaggagtcaagacagctttgactgacagatcccttgggactttgggtcactgcctcattttttccctccctcggtttgctcgtccacaaaatggggattataattcctatttgctacagagcatttcaaaggcaacaatggggtgaggccttgagtcagtggcagggggctgcatcagatcacctctgcaggttccctgtcctctctttttagaagggattctagggccaaggccttagtctcaggtgcaggggcccagcggtgaagtgtgtgcatgtgcaggtacacgcagcactccagccacactgcaggcactaagtcatgttggttttctccccctcttctcaggccactacccagatgcaaaaaatggcctgggcagaagttaggaagcctgggtcctagccctgggtctgcccccgactttctctgactttggccatgtcccttacccaacggggcctcggtttccccatctgtgccatgaggagtttggatggttttgagattcttctctcttggctctgtgaaatccacaaccggcccagtgaggtctgacccctgctcgcctccctggccatcactgggcagttcagatacactgaccttcctttgcttcctggaattttccagctccctcccaccccaggacctttgcacaagcccttgccccgcttaccacaaattcacctatttttttttagatggagtcttgctctgttgcccaggctggagtgcagtggtgtaatcttgactcactgcaacctccacctcctgggttcaaccgattctcctgcctcagcctcccaggtagctgggactacaggcgcccaccaccacctcgcctggctaatttttgtatttttagtagaaacggggtttcacatgttggccagtctggtgtcgaattcctgagctcaagtgatccacccgcttcaacctcccaaattgctgggatcacaggtgtgagccactgcgcccggccaaattcacctgattagctccaactcatccttaacagcactcagctccatcatcacctcctgaacacccccagacccctcctccaggacgcactctcacagagtcctatgcccctcctttgtaatacttaaccacccctgcatttcacatttatgttgttccttgattgagaactgtccaccgcacccctggctgtgaattctatgaggtcagagactggatctgtctttgtccctgtggtgcccctgacacccagcactgggcctggcacagaggagatgctcagccgttgaatggatgggcagacgacctccccattctttgggaccagtatagggctgtctctgctcacaaaagctcctccctccaggcacctatgcagagcagacctggtggtgaggaagaggggaggccgctgaggacctgaggggctccacccttccctgggagctgaggtgatgagaggccctgccttcagaagttgggctgggagacacggggagccccgaggggtgcgtgctgtttacagtgcacacccacgtctgcgctctctctcgggggctctcccagccagctgagggctccacaggggcaggtagtgtcagctccatttgccagacaaggaaaacagccccagagggatgctggctggaggaaggctcacatggcaggcacaggacagggctgaggtatgaccccaggggtgatgaagctggaagggctttctgctctccatctgacaaaggcaggaacaggcacagagggcagggatcagcctagggtgttctcagccagtcaatagcaaggtggggacaataggaatctataattcttttttctttttaaattgatggttttggccaggcacagtggctcatgcctgtaatcctaacactttgggaggctgaggcgggcggatcacgaggtcaggagatcgagaccatcctggctaacacggtgaaattccgtctctactaaaaatacaaaaaattaggcgggcgtggtggcgggcgcctgtagtcccagctactcgggagggtgaggcaggagaatggcgtgaacccgggaggtggagcttgtagtaagccgagatcgtgccactgcactccagcctgggcgacagagcgagactccgtctcaaaaatagtaataataataaataaaataaaataaatggatggtttctggctctgttgcccagggtggtgtgatcgcagctcactgcaacctccaacttccaggttcaagcgatcctcctgcctcagcctcccatgtagctggggctataggcatgcaccaccatgcctggataattttttaaatttttttgtaaagacagggccttgctatgttgcccaggctggtcttgaactcctaagctcaagcgatcctcccgccttggcctcctgagtagctgtaatcacaggcgggaacgaccgcactcggctgggaatctgtagtttttgaactctgatacctttctcctgctaggctgaggcagaggattcctggccttgaccctggatgaccctgaggcttcagatgatggatcacaccacagggcaacccgtgggagtggataatgttggcagaagcactctaaggatttgggtagcaggatagtgccaggcagtctgggttagaaccccagctctgccactcaccagctgtgtgaccttgctcgggtgcttttaacctctctgtacctcagtttcctcatctgtgaaatgggggaattctgggttaactagtcaatagaacaaagtacccagagcagggaaggtctgagacagtttctaataaacatgaactctggagctgacctggccaggaacaaggggagtgactaagtcctctctctgtaccaaggctctggcgtaagaagtaccagctctcagctttgtgccctcagggccactggagaaaatgtcagagaagggcttcaaagatcacagcgactgttctttgagcccactgctactccacaacccactgaatcctcacaagtgccctataaaaatcaggttcaaggccgggcatggcggttcatgcctgtaattccagcactttgggaggtcgaggtgggcagatcacttgaggtcaggagttaagaccagtttggccaacgtagagaaaccccttgtctactaaaaatacaaaaattagttggacgtggtggcgggtgcctgtaatcccagctacgtgggaggctgagataggagaattgcttgaacccaggaggcggaggttacagtgagccaagatcacaccagtgcactctagcctgggcgacagaacgagactccgtcaaaaaaaaaaaaaaaaaaaaaaaaaagcaggctctattattctcccactttacaagtgtgaaaaccaaggctaaggccagtgtcttgtctaagtcccacaggctgtgacttgcagaaacagggcgcatgcccgagcctgctcttggggtcacttgctctgaagagcccaggaaccaaagggtgaagacagagttgagttggccctggggagtggagtcctggagagaggtcctgggctggggctggcgggctggggagaacttggacagcaggcataggtgggaagtgcaggtacagccctgtctccccaggaaaccaggcctgaggtgtgccctgttagtcaatcacatcatttgcctggtgcctgtaggggctagctccgtgacggcaaggctgaatctttggtccccactgtatgcagcacccagcccaggccctgcccactggcaggcactcagtggatgcttgttgaatgactgagtggaccaggcatcctactctgtggtcaccagactgctcagtgatcatgagcaccatgctacaaacgaggaaactgaggctcagggtggggaagggaactttcccagcccacccaggtctgtctgaatcttttgtttttgttttgaggtggagtttcgctcttgttgcccaggctggagtgcaatggtgcaatctcagctcactaaaacctctgcctcccgggttcaagtgattctcctgtttcagcctcccaagtagctgggattacaggcatgcgccacaacgcccagctaatttttttgtatttagtagaggtggggtttcaccatgttggccaggctggtgttgaactcctgacgtcaggtgatccacccacctcagcctcccgagtggctgggattacgggcatgagccactgtgcccagcctgtctgaatctttctttaccctcctccaggaacatgatctcaggaacacatatctccttttccagccggaagtacctgagagagaccccagaaggtggataagactgcagagagcagggagcatgaagcaccttgcccaaggtctcaccaggcaagagaagggcggagaagggcggcttcttcatggattgtaaatccccaaagcgtgcaaacgtaaggactctctttagggctcaaggggtctaaacttacccttttacatacggagaaactgagggcgccccaaaagatgtgtcatctccagggccaccgagtggttgagcaacagactggaacccagcgtagcaaatggaaaggccccgaggctggcacacagtatgagctgaggccagtgggcttaagagcgactggggaggtgggctggggccaggccaagcaaggagcgtggactccagaccacagccatggggagccactggattggaaaggtctagacaccatctggcttgggttctcaagagacccctctggctactggggactgactggcctgcaggagcgtgggatgggagtcaggagacttgggagggtcaggccaaaagccgtggagtcatctctgcccctggcccttttctctcaccccttacatctgatccatcagcaaatccctttggctccaccttcaaaatataaccggaatctgaccacatctcaccgccccattgctgacacccctagcaacctctccctgcacctgacttccaacctggccctgccacccaccctccataacacagccagagggaaacggctgaaacaagagtcagatcgcacccctcccctactccaaagcccctgtggctccccacctcactcagaataaagtcctgagcctggccctggagggcctcatgctctggtcgccctgcccattctggccatgtgtccccaaggctctcgcccaacccctggctgcggcacactcacaacttcttggcattcctgcctccgggcgggcgtctgtacatgctgggccccctgcctggagtgcccttcctcagatgtctgcagggccagctccatcttctccttcctgttgtcagatgccaccttcccaggaggcctccctaaccaccccgtttaacatggccccacatctccttccgtcacacacacatgctttctcggctccattttctccaaaatgtgcgtcactttccaatgtaccatttaatgaacttattcatagtgtttattccagctctgtcccccattaggatttcagcttcctgaggacaaggttctttgagtggcccatgcccaaaacaggcctggagcatggtagatgcttggtaatgacatgctgttgaacttgagtggttttcctaacaattctaggtgggagatcaccctcatctcctgtcacagagaaggaaactgaggctcatggaggaaaataaattgctcgaggtcacaaggccaggacactctggggctggggtttggacagagcctcctgctctgtccggctcaggctggcatgggctgggagcaggacctctgagctggcgtgtggcaggggccctgccaggtgccctgcggttggtaccctccctgaggggccatggcgggctgggccgggagaaggcggtggcagccctggcagttccacccgttccagggtggtgtaagagcaggttgggaaaggcccaggggcaccagatccatcctacagttgcccagtcctcagagcctgaacggccacgggtgagaaaggaagtcagcaggatccaaaataggcctgtgtttcgggaagtgaaactgggcatcggggacgccaggccggaggaaggcctgggcctcctgggttgggggcccccggggcgggggtctttccttgcctccttggcctggggacagttggtcttgggactgatccctgccaggaccttgggaatgagctcaggcccctctcgcaagccaagtgaccctggacacatcacttcagctctctgatcttcagtcttctcatctgtaaagtggggctaagggtaggacttgcctcactggggactgggaaggtgagactgtgccctgaagcccaggatggtcacagttacccttggcgttgcagagccatcgtgggtgctcctcgtccaggaagcacccccagatccttagatcagaatgaatcactccctccccagtgtccccagcccctctcaatttctttctattttatttatttatttatttttgagacagggtttcaccctgttgctaaggctggagtgcagtggtgcaatcatagcttactgaggccccgacctcccaggctcaagtgatcctcccaccttagcctcctgaatagctggaactacaggagtgtgccaccatgccgagctaattttttttttttgtattttttgtaaaaatggggttttgccatgtttcccaggctggtctcaaactcctgggctcaagccatctgcccaccttggccttccaaagtgctgggattactggcgtgagccaccttcccatcctgccccctctcaattgcttttggtttctgttcacatatgtcttttccactagaggaggccaggagtccacctgagtcttcttggtgtccccagtgcccaggatagagcctggcggatgggaggtgccacccatgggccaaatgaattagtgaaggagccagggtcggaggcctgtggatgcccttgaggggtctgatccctgcctcccgacagccagctcctcaggggtggcctggagttttggcaagaggaggctctgagggcaggtgagtcatgtttcccctgaatctcagtttgctcatctgtaagatggatgagaaatgggacccacagcttctctgtcccagatcaatgaatggatcacccaagatgccactctaggaacctcagaatgtgcctggggcagggctgccccagagtggaacccttcaggcccaggtgacctgcattctactttctccagcccctctcctgccctggcaagaagcaggactttgtagcagaaaaactcaggtgtagcggggcgggcagggaaggtgttaccacctaatagaatcaggaagctctaaataacgatgaagtgcacatgctgcagggggccttacaccatccaggctttacagctaaatcccagagaggttaggctacgtgtccaagttcacacagcaaattagggcagagcagggagtgtgcccagccctcctgactttcagtcccagggttcattcagcccatctaccctgagcaattgctggacacctgtgagcacatttcatagtcaccgcatctccacaaaagcgagaatcagaacacccatcctacagatgaagacctcaggctttgagaagggaaggctctcccaggacctttctcacccacctgaggccccacctttggacctacttaagggctcctgaaggtcccctgaaggctgggcctccaagcccaggactaaactcagagctgtgtggctcctccaggaaggacctccgaaggtccatgtcttcctgaacttcccatcaaccttctcattctaccagtctcacccaggagtcagctgcttgtgcacactggtgcctggaagtcccactgtgcactcaactagctagactgagaaatgagaacaaacacgcgctgcccggcatttgctgtgtgctgggactgaccacagctctcccgagtctcacaggatctccgtgaggtcagctctgcgatcggcctcatctcacagttggggaatgtcatgcacacccgtgactgagctcagctctgaaaacctgttcctctctcagttcccagcccggggagaggcaccactgtgctgagcaccaggagtcactcctggctcctcccacagcctctccccctacagcctgttaaatcgacctcctaacttagccactaacctgctctgtgaactgagactagtaactagtaatctgtcaaacaggataacagcccaggcccgggaagagttgcagggactcgccaccactgcccagctgtgtgaccttgggcaggagaacccacctcgctgggctgaggtttccatatctataaagtggggatgataatatggctcactgtccagggacgtggtaaggattcagtgaccccctccctcttgtcatgcctgagactttgctccagaaactctccccatacaaagtgctagtttttcttgaattttaaaagaacccttctctgagcacccctcccttctctgctgtcccgtttttctccagctgtccggtttttctccagcccttcgctggaacgccctgaaaacacacctattctcgctgtctccagagtctctctcccctcttctcccttcaatccactccccacagggtctcccctccccctcccgaggaaatgaagaaacttcgcgtttctaaacctgcccaatgccatctctcagacctccctatctggacctgtcagtagcatcagatgcagctaacacctgctgctccttcaaacgctgtcctcccctggttgtgagaagaaccctccctgccagttccctggctgccccttctcagtccattttctgcctcttcgccaatctctccctcacctctcaggctgggggccgtgggctcaatccctgggctgctgtccctttccatctgccttcctccctggctgactttaaagaccgattctctgctgccctccacactgatatcaacaacctggacatgccccctgagctccaaagccacacatccacttcctcctgcacagctcctccgggcttctccaggatctcctgatatttgcacatagatcggttccaccctcaaccctcctcatcccagagaatggcgactgcattctcccctggcccaggccggaacactggctgtcatcctcaaccctttaccccgtccatctctaactctctctcatctgtctctaattctttctctctgcgtctgtctccctctctgcctctgtctttctgactttgtctctctgtctctctccctctgactctgtcactctgactctgcctctgtcttatctctgtctctctctctgtctctgactctgactctctgtctctgtctctgactctctctctctgtctctgactctctgtctctgtctctgactctgtctctgagtctctgtctttgtctctgactctctgtgtccctgtctctgactctctgtgtctgtctctgaatctctgtctccctctgtctctctctgtctctgactttgactctctgtctcctccgtctctgacactctgactctctgtctctaactctctgtctccctctgtctctgattctgtctgactctctgtctctgattctctgtccctctgtctctgtctccctctgtctctgactctctatctccctctgtctctgactgtctttggttcagacactctgtgtccctctgtctctgactctctgtctctgtctttgactctctgtctcccccgtctctaacactctgtctctgactctgtctccctctgtctctgattctgtctgactctctgtctctgactgtgtccctctctgtctccttctgtctctgactctatgtccctctgtctccttctgtctctgtctctgactctctgtctctgattctctgtctctgtctctgactctctgtctctctctgtttctgactctctgtctctgtctctgactctctgtgtctctctctgtcttacatcccacatcactgcatcagtgaatcccatggactctgaccccaaacacatctcagtccccagagctgctcacaacccctcagcctcccctgggccagcctccaccatctcacctgcatcttcactccactgcctccctgttctgggggcttctgcccatgccgcctgcagtctactctccacccggcggccagaggggccccgtcccaggagagtcaggcccgtccctctgctcaggcccagcagtggctcctgtgtcactcggagaagcccagtcctcatagagatcttctttgagcctgcacacccccgaccatggcttctcctgcccagtctccctcccctgccaggctgaccccactgtagctcctgccaggggtgtttgcctcctggaaagttcttcccctagcagcaacagcagaaacatcctaccttctttcagggcctggagtaggagtctccttctggggaggcccagcccgtgccctgtctaccatcctgaccactgcctggcccttccccacctgtccccttctctcttctgtgctgtcctcacacaccacctatttcatctgtttaccatgtttgtcgtaggttctcccaggagggcagggctttgggcctgtgttcacgccgccttgcccgggcctagaatagggcctggcctgcagccgggagccaggctgctcgctcttggtgaaagagtgcccaggaggggcacagtgagggcatgcagggtgagagctctcagggcctgggcgcggctatggcaacgcagcctatgcctgccagtcccttggcggggcctgtggcctccctgccttcactgctgtccacggctctcactggccctgccttcctccggcctgtggccccactcagacccaccccattccccacaatggatgtcagaaaggcctttaaaaacctggatctaattatgtcaccccctcccctgagccctgcagtggctgccggtggccctcgggatcatgtccagagtccctgcgtggcgtgaaggcccctggagacccggcctcagccccctcccctgtctcttcctcccctgcagatctgcccccatctccctggaggtggcctgttctccacgccaccctcacaggctgcctggcggactctcctcacagcactgtgcttcccggggcccacttgtacaggccccatgcgagaaggacctcgggcagtgtataatcctccaagggcccacaggaacagcagtgacaactgtgttatgaagcacctactatgtgctggggacaagaatggaacaagaagacatgctttgccctcacccctggagggcagcttccagccagggaggcaaatacctcctccccagactccttccacagatccccaaactctgcctctctccttcagatccctgctcagatgtcaccagctctgtgcagcctccctgccaccaagtctaaaattgccatagtcccctcagttcctcacccctctccctgctttctttgtctgtctcatccatgaggatgtgccctctgggaagggcaggcaggagctggctattctgttccttgccctgtccccagcaccgaggacagtgccaggcatggaggaaataattgctgaataaagaaataaaatcgacattctatgagacataaagcacagttcagacacatggagtgaggggtggttccattctgactgcggtgatcccggtggtctctctgagtaggtggcattgagctgagacccagtgatgtgaaggactgagcgtgtgtggaggaagagtattccaggtggaggaagcagtaaatggcaaaggccccgagacagggctgagctctgtgtgtaagtgaggccagagttgagtgaaccaggggagagcggggtgggtggggctgagctagggagaagttttcctaaaccctttcccaggagagtaaactgaggctcggggaagctaagtgctaagtccaaggccacaaaacaaggagaggcagaaacaggctagacctgggtctgctggtctgaggggccctctctgtgcaccctgggactcagccacgctctacttattaatagctaagccaggtggggccccgctgggtcaggagccccaggtttaggctcagcccagtgacctccagggcaaagcccagtgagtgagcccatgaatggggccggctggggaacaactggaaccctggtctccctagagctgggccattggcatctgggggaagcccgatttgctggggtcggggctgactggctgggccattacccgccgggggcctagagcccacggggaagttgggccaggttgcccctgctagaaccttcccagagtctagagcaggtggccgtgatgccctgctctctgcggctgggactccaactactcctgtcccctccccggctcactgcctgtgggtcactcccgctgctcccagatggccatgctcattccctccctccacaggccttttgccctggctggtgcctctgccagggactcttcccctaatccttgtgtggctggctcccgctcctactcgcgccccagctcaagggtcacctcctcagaggccccccgaccacctgtctcaagcagccctgctctcacccccctcactctccatctgagggccctttaaggtctttcatggtatttaacaaaaatatcaggcatcacatgtattgtgggcttgtctattgtcaatgccctctcccttcactggggtgtaagcaccccatggatcttgttccctgaagtctcctcagggcccagcacagggcctgacactcagtagatgattaataaatatctgtggaatgagaacatgagcgtctaccccgcttattgtataaaagcagcagttgaggttcagagagggtaagtcacttgcccaaggtcacacaacaaaccagaggcagaaccacagcaggagcctggctcagctcacttgactctgcgtccagtgctcttcagcctacaccataactagcactcagagttcaaccagcctcaccccagcctttcaaatacaacctttatccctcatccccatctttcggtcctgggaagaaagaaaatctaagtagaagaggtggaagggggcaaacaagggagactaagtatcacaggtgaacaggtgctcaggattcctgtagtcccatgtaacagattccagcaaggttgggttcctggcctggggcctctgggcctctgggcccatggtccagtctcatccttgcctgcttgagctggaaagggttaaattttgtgcttggctcctgccttgctgtggaccgtggctgggacagaacatctgtctgttgctatggttgccatacacttgaaggggatggctggataattatggcaaacgccgccgagcgagtgagcgggtgcccggaagtggctcgggacccttgcccgcccagtgcagtggcaggctgtgggccccttacccactggctcactgtggagcccctggccctggacttgagttcctgagctagcagaggagtcagctggggccactttggcctttgcttcatgagtgagcctggctacagagccccccgtgaatcctggagcagggcagacaccagcagcactgggcaccggagcctgtgggctgtaggcctgctggcacaggtggtgggctcagataatgccctggtgccactgtgtcctcccccaggggagaagccctgtcatctgtccctgccatgaatgccccagagcccaggaggcagcaggtggagaccgactgcccacgtcctgtcctctcggctctgcctgctcgcagggatgcttcagcttcctcgtctgctcatggaggatgagagggcctccctggcagagctgaaggaggtctgtctggatagggcctggggaagaggtggctctgggacaggaaatggttgccccaaccttgctcagcagggggtggggaaccttaagctgccgtggatttagactgtggtcccgtggaaaggctggagattgcttggcacagtaaccagctacatgatttgtgcttggatccaacccttgcccagccaagctgtgggcaggcagaggggcttgcacccgggagggccagcccttccaccccacctcctccagcctcgccatggtaggcagctgagcttcctgaaagctcagtacagactcgcaagctggcagaccccagaggcccgagagatgctggcttccaactccttctgtaaccaccagtgagacagaggccgggcaccctccccaaggtcaccctcacaggttcctggctcttccccatgctgctgccccctctcctggcaacttccctcctcccatctgcctccctcacataacaattgcagtcataataactgacaccatgccgggcactgagctgtgtgcacacggcttactcctttaacaacctacagggagggtgccatttttaatgctgttttcactgggagattattgaggcatgcagcagtaaagagagctccccaagttctcctggctgggaagtagtacagcccagaagctccaaacagggccactctggacactgactccttttctttccccctcccactaaagatgaccccttgagagccaagatggtcttattcttctgtttctccagctctgttcacagaggaggcatggatgcacatttaactttccacgcatgcattcattcaatatgcactgagcacaggcgccgggccctgtgctgagtgaatcagtgaaccctcttccccacattgggctatccagaggctcaaaagacatttgccccagggcacagagattcaaacgaaggatgaagttactctggcagccattacctcccagcatctcccattggcctgaaaggggcagggcagtgaccacaccctcatgttacagcagaagaaatgaaagctcagagatatgaggagccctgtcgaaggtcatacagccatgtctcaggtggggcagcctctggaacccaggaattctgcaccccacagagctcggtcagcagagaagactgcctgcccaggcatggggatgacttcgctcttgatggaatcccagtttgcctgggaccatcacagtttatacccctcagtctcaggcaagctggacagctggtcatcctaactcaggacctcccaagtgccacaagcccaggctttcgggtccagctacctggtctgggatccaatttccctcccttccaaagactaggatcttggataagggagggctcctctgagcccctggtcctccctcccccacccaaggacctgtgggccccgcctcaggctgccttaacaagttgaagtcagtaggcctatgccagaggagccaccaggcctgcccagttccttagggaatgttggctgagcaaggaggcccaaggcctccttaaagagacaggcacaggctatagccaagctccacatatttaacaggcagctcctgtgagccatgaatcagcatcccagggccctttggacaacacagaagcattttcccagccaggtctctcttgcagctattggggtgagggtgggggtgggacaaggaggcctgcgagaaggggcctgggcacaggaaggctgctcctctgccagctgcagggcttccttggggatctataggtgccaggcacagttaccaagacacatggagaaagggctgcagtgggaggcatgaggcctctctggctccaggcttgatcctcctgctgcctagtcatgtaatctcagatgggcccctgagctttcccaggccttactgtccctggaacaatggcatctggcctctgcaactgctaagcccccttctagccttgctaagatccactgactgaaaccagtcttccagattcccagtgttagctggctgaatcctaggccttctggtccctgggtctcaacactcagcctgatagagtagatgctgaggaatgcacagtagaaagatggatggatggatgaatgggagggtggatgggaggatggatggatagatgaatggatgggtgggtggatgaatcaatggatggatggatgaatgaataaatggacagatagatgcatgcatggatggatggatggatggatggatggatggatggatgggaggatgggtgggtggatggatggatggatggatggatggatggatggatggatgagaggctggctggatggatgggtggatgaatgaatgaatggatggacaggagggtgggtggatggatggatgaatggatagatggatggatgggaggctggatgaatggatagatggatggatagatggatggatgggaggctggatgaatggatggatggatagatggatggatggacagatgggagtctggatggatgaatcggtggaaagatgaaaggatgggaagctggatggatgaatggctggctggatgaatggacaaatgcatggatggatgagaggctgactggctggccatttggctggatggataggagggtgcataggaggctggctggatgaatggataggaggctgggatggataggtgggtggacggatggatggatgaatggatgaattaatgaatgaatgagtgaatgaatgaataaataagtggatggatggatggacaggaggctggctgatgaatggatgggaggatggatggatggatggatggatggatggatggatgaatgggcagatgggtggatgggcagatggatggattaatggatggatggacggatgaatggatgggaggctagatggattaatgggggaatggctggatgaatggacaaatggatggatgagaggctgactggctggccagctggtgggctggctggataggaggctggatgggaaggtggatgggtgaatggatggatgggagggtggatgggtgaatggatggataggaggctggatgggagggtggatgggtgaatggatggatgggaggctgaatgggagggtggatgggtgaatggatggatgggaggctggatgggagggtggatggctgaatggatggatgggaggctggatgggagggtggatgggtggctgcatgggagggtggatgggtgaatggatggatgggagggtggatgggtgaatggatggatgggaggatggatgggagggtggatgggtgaatggatggatggagagaagggtccctgaactggtagactccttagtgcccagcatgagctctgcctgattccacttaggtaaagggaaattcaatgggcaaatgagtccttcactccttccttgctctcagttctcatatccactctactcccagagcccatctattttacctctaactctctctccaactcccctaccacctcccaacaaaggccactaccccctctagcctggacaccgcagcacccatctcactaggctccctgctgccttccaaaccctacttcaggtcattctctgagggcagtaggaggagttatgatgtaaattagcacctacttcccaccgcctcaaatctcccactggctctcctggagctcctaactgggactgagttacctctggacctcatcttccactgccttcacgcaatctccgatccctctgtgctctgctattaagtggtctccttgctgtctccaacaggcaccatgctctcacccactccaagacttagaacactcctctgccacccatccccagcctcagagccaacatacccacatttcacccacctacttcctactccccttcagatctcaagtcagcagccacttccacaaagaagccctccttgacccccagcctggacttttattttacagctcttcttacagctgcaggcatgtgcttgcatggttagtaacatctgtcccccaggacacaaaccagcatgggcctggggctctgtctgtcccattccccgctaggcccctgtacctagcatagcatctggcactaagtcaagctcattgagtattagtttatttattttaaatataaaggttttaaataaactgcacacaggctggagtgcaatagtgtgatcatagctcactgtagcctcaaacttctgggctcaagaaattctcctgtctcagccccccaagtagctggaactactggcatatgccatcatacctggctaatttttttacttttttttttttttttttttttttttgtagagacagggtctcactacgttgctcagactggccttgaactcgtgggctcaagagatcctcccttggctgggtgcagtggctcatgcctgtaatcccagcactttgtgaggtcaaggcaggcagatcacctgaggtcaggagttcaagaccagcctggtcaacatggcgaaaccccatctctactaaaaatacaaaaattagccaggcacagtggcacacgcctgtaatcccagctactcgggaggctgaggcaggagaatcacttgaacttgggaggcaggggttgcagtgagccaagatcgtaccgctggacttcagcctgggtgacagagccagattcttgtctcaaaaaaaagaaaaaagatagagatcctccctcttcggcttcccaaagtgctgggattacaggtgtgagccactgtatttgttgagtgaatgaatgaacaaatgaatagatggaagcctgcatgaatgggagggtgaaggatggatggagagaagcagagtaaggagccaggagggagagggtgagggaaaagctgttttcacagggtggctgaaggtggaggagccattctcaaaggaggtaacatctgagaagaatcgggggccatgggctatggctcacgcctgtaatcccagcactttgggaggctgaggcaggaggattgtgggaggccagtagttagagaccagctggacaacatagtgagaccctgcctctacaaaacatgaaaaagttagctggtcgtactggtgcacacccgtagtcccagatactcaggaggctgaggcaagaggatcacttgagcccaggagttcaaggctgcagtgaaccatgattgtgccactgcaccccagcctgggccacagagcaataccctgtctgaaagagagagagagagagagaaagcatcaagggggaggagggaggggccttgtgagcgctggggcagaggacacggcattgcaaggatctgccccacctggggccagcacacatctggtacaaccaaaggacgcaggagtaagcaaggaggagcagggtactggagaggccagcaaggggtcagcagagcccctgggccctggggctggtcccaagggtgataggaggagccaatcaagggcctgggacagagcaagactttgtctgactttctcccctgagtagaacataagttcagggagggcaggccctggtgtcttgtttgtggttgtgtatgcacctagtgctgagttcagtgagtggcagagtggattctacaccggcgtcggaggacacatctgccacccctgctccccaatacaacccatttcctgcccagcagtcacaggggttcttctaaaacaggtggtgtctttcctctgcttcaagccctctcctggcttctggatcactcagaggaaaagctcaaggccttgtgatggttcacaggccctacctcagggattctcagccccagcactagtgacacttgggccgatgactctgttgtgcagcctgtcccgggcactgtaggacgtttagcagcatctctggcctctacccactagatgccagtagcacccactcccagtggtgacaccaaaatcttcagatactaccaaaggtctcctgggcgacaaagtcttccctactgcagggagaggagggatggaggagacctctgtcctagacccctactgaaaatagcacccccaacacttcccaccctggctcccagctttattttctccatagctcctaacagcatctgccatttctttgatttatttgtgtgttcagttggtctgactctcaacctagaatgagctccctgagggcaagtcctagcttggatctcccctggggcagcacaaggtgatctccctctgtttgcagagatgatgccttaatctcctgaatttggatcctatctctttgaattcggattgtcactccctgtttgacggaagaaaaaactgaataagaaaaaaaaatggaggctgggcatggtggctcatccctgtaaccccagcactttgggaggccaaggtggtcagattgcctgaggtcaggaattcaaaaccagcctggccaacatggtgaaactccgtctctactaaaattacaaaaattagctggctatggtggcgggcacctgtaatcccagctactcgggaggctgaggcaggagaatcgcttgaacccgggaggcagaggttgcagtgagccgaggtcgtgccactgcacttcagcctgggtgacacagcgagactccatctcaaaacaaacaaacaaacaaaccaacaggatcagagaggttgggtgacttagcccaaggatgatcggcttagcctgtgatgctgacaggactgaaacctagggcctctgcctctaaatctcagttcatttgactctgtctgtgtccctgacaggcctcagcctgggacagggtgggcaacgaagaggccagagcagctgggtcccaggaaatgagcactccattggggctcgaacccaggaccacctggatatgaagcagatgagagatctccccaccaggcatgagagttgggggagcgggggggcggttattgctggggatgcaggtgaaattattccagtgattcattcatcctaattgacaaggttctattgaattccttaaaagccccaggctgtgcattttggaaaacatggctgcagtgcactgggaaatgtcctctgatatcatgcaggacagcagacactctttaaagacaaaagttgggccagggacagtggctcaagcctataatcccagcgcattgggaggctgaggcagtaggatcacttgagcccaggagttcaagactagcctgggcaacacagcgagacctcatctctaaagaaaacaataaaataaaataaatcaaccaggtgtggtggcgcatacctgtagtcccagctacctgggaggctgaggcaggaggatcactcgaacacaggaggttgagcctgcagtgaaccatgattacgccactgcactccagcctgggcaaccaagtgagatcttgtctcttaaaaaaataataataaaataaaaaaatgaaaaataaataaaaaggataaaagtttgttgaatttacccagtatacattccaattggggtgggatgctcaggagaatggggtgcaatttcctgaagaagagaatgagcttttcataaattaccaggaggaaaatagtgcatgtcagaataaactctgtcaagaaatacagcagggcagccggacagttaataattcagagctgttccatagcactcctcgggatttaaaaaatatttccttgggattgttgcttaaaaatactgttaatggccgggaaccttctcattgtcattaatgggccagctgggtggggctcctggtggtcccccaggaaaacaccagggacacccatctcattttcctcgcagagcccaggatgggcggtgaggactggcaggctcagagggggcaaaagtccagccccagaccacacagctaggaaatggtggctggagctccaatgggaacccaggttgactttcaatgactccaccctgactccgggcaagggtttccccttctctgcacttccagtttcctcatctgtaaaatggggacccatgtattagctcagagaacaaatatttatggagtacttgattttttgtttgttttttgagatggagtctcgctctgtggcccaggctggagtgcagtggcacatctcggctcactgcaacctccgcctcccaggttcaagcaattctcctgcctcagcctcccgagtggctgggattacaggcgcccgccaccacgcccggttaatttttgtattttttagtagtgacagggtttcgccatattggccaggctggtcttgaactcctggcctcaggtgatccacctgcctcggtctcccaaagagctggaattacaggcatgagccactgtgcccagccggagtatttgtcaaaatccaggtgttaggatggacggtaaccgaaacagacccagtcctctcacttcatggaactcggtctggtggaagagtcagacagtgaccaaatatatctcctcaaaaatggtaatcggtatatctagaaaacaaagacgagtaaagggacaggggggaggggggagatttcagttaggataatcaaggagagcctccctgggcaggtggcaattgatgacagacctggaaaaacagagagggagctgagaggctttcagaagaagagggcggtgagaaccgcaagtgcaggggccctgggaggggctttgcctgcagtattggaggaacagagaggggccagcgtggctggagcacagcgagccagcgggagagaggtgggaggagaggtcagagaggacggcagcggccagctcctgggagaccctgtagacgtttgaattttattctaagaatgatgaagatctgccacagggctggtttgcaggggatggattggttatctattttattggtttatctatttattggattggttatctattttaaaaagatcccctgaatgccagacacagtgggttgtgcctgtaatcctagtgctttgagtggctgagatgggaggatcacttgagggtaagagtttgagaccaacatggacaaaatagcaagaccctgtctctctatatatatgttttttaatttagaccgggcacagtggctcaagcctgtaatcccagcactttgggaggccaaggcgggtggatcacctgaggtcaggagttcgagaccagcctggccaacatggcgagagctcatctctactaaaaatacaaaaaaaaaaagacttagccaggcttggtggtgcatgcctgaactcccagctactactcaggaggctgaggcaggagaattgcttgaacccaggaggtggaggttgcagtgagccgagattgcaccattgcactcctgcctgggtgacagaaggagacaccgtctcaaattaaaaaaaaaaaaaactatgtgtgatggtgcacacctgcggtcccagctattcaagaggctgagtgggaaggatcacttgagcccagaaggttgaggctgcagtgaagtatggtcacaccactgcactccagcctgggcgacagagcaagaccctgtctctacaaaaaaaataaaaaataaaagaccctctgaaaagtctccagattaaattgtcaaatgaaaaatgaacaggacagaaccacatgcacagtatgctactgtcggctttaaaaaaaaaaaaggtatgcattgtatatacataaaattatctctggcatgatagatgaaaataggagaagctgcctgcctgtgaggaggagtcctggctggctggactgggtgggagggatcatttctacattttttcttgcaccttttgaattttgaaccatgcaaatttgttacctagtcaaaaataaataaataaatactttttggaagtaaagaaaaaaagaaaaaagaaaatgaaaaagaaaggcccctctggctgccgtgtggataatggattatagattcaccagggtggctggggtgggaaggaggcttgagtgagttggtggggatgaggctgggggtgggatagtggggagggggctgaggtggggaggaggctggggtaggttggtggggaggctggggtggggaggaggctgggggtgggatggtggggaggaggctagagtggggaggaagctggagtgcagaggaggctggtgtgggttggtgggaaggaggctggggtggggaggaggctggattggtggggaggaggctggggtagggaggagactagggtggggaggaggctggggtggggaggtggggagatattttcagttccactgtgtagatgaggactgtgaggctcagacaggccaaatgccaagctgcagacctttcggctggaaaatggaggatgggcttggatgagaacccaggcccatcagggtcctcattacctcccttctgttctctgctatgtgttcccttgaggccccggtatgagggatttggttccctgggtcccgtacctacagcaagatcttgaccacaataggtgctcataaatgtttgctgagtgatgaatttgctcatttgatcattcattcattcaacaaatgtatcagtgactcctctgtgccaggcatggtgctagggccctgggattcagccttgaacaagagaaagctcccaccgttttggagctcacattctcagggggcaggggtgtgacaggcaatcaagatatgtataatatgagcactaagaagaagagagcagaccaattgagaggggaggtgccttcagatggtcagggagggctcggaggaggagggcatgtgacagtagagacttgaagaagtgtgggttgggtgcctgtaatcccagcactttgagaggttgaggtgggaggatccgttgaggccaggagttcaagaccttcctgggtaacagagagagactccgtatctaccaaaaagccgggtgtggtagtgcacgctgtgatcccagctactcttggaggctgagatgggaggatcacttgaacccaggaaggtggaggctgcagtgagccatggttgtgccactgcacttcagcctgggcaacagagtgagatcttgtctcaaaaaaagaagaaaaaaaaagcggtgtggagtttgccccggggacactgggggaaggccattgtaggcagagggaacagcaggtgcaaaggcatgaggtgggctcgtgcttgaaatgtctgagcaacagcaaagaggggcagtagagtgagccagggggacaggcagccaggctaggccatgcctcgtgggtgctggattcctccggggatggcagaaggctatggagggctctgagcaggggcttaacaggctccgaacgaggtttaaagcgaatgaagctgcgccctgtaccatctgtggcgtggggaccgtggcggcctaagctgcacaggctgccttgcaagattctgggagaagaaaatctcagagtgctgaggccagagggactgccccaccctgcaaggatcttgggtgttctggaggggacctggcagtgcagacagagcctggggttcatgtcctgactctaccacctcccaggcgcagagctcaagactgctcctgggacctccgctgtctgccttgtcacagggggacagggtcagggagggagaaggattcctgaaggctggcgatgcttggtgtcccgcagtgcaactgccagtggcagagcccgacccgggcagctgaggcccaccaggaggaagcaacggcctggaggccgaggggccaccgccacctccactgcccgtcgctgcagtcctggctctggctccggaggcctggctgtggcctcctgtgctttcaccatctgtgcactgcgctggccaggcgtgccctgctctagggtgcccatctggacgccaagctgacagcacatccggctcgagcagggcatcttacaaaccatcgttagacctgtcaggcttccagcaattttgtttggttttggtttggtttggccccactcctctcctagggaagggagaggtcagggaagggagaggagaaaggagctcaagcttcctgtctactctttctgggctggccaacactcaccatctcattctgtcttctcagtccccattgacaggtggggaaactgaggctgaaaatggtgactgtccaaggccacttgagggttaagtagcaaagccagaagttaaatccagggctactcttggaggctgaggtgggaggatcgcttgagcccaggggaaggtcaaggctgcagtgagccatggctgtgccactgcacttcagcctgggcaacagagtgagatcctgtctcaaaaaaagaaaaaaagaaaaaagcagtgtggagtttgccctggggacaccgaggcaagggcattgtaggcagagggaacagcaggtgcaaaggcatgaagtgggctcgtacttgaaatgtctgagcaacagcaaaggagggcagtagagtgagccaggctggaccacgcctcataggtgctggaccttctccccagtcccagttcccactggcacctgactcctggtaggggcttgggtgtgggtggggtagagaaaacagcatcctcattccagattctgggccaggaaaggctcctggccatggttcctctgtggcggtggggaagagggccggcgggcaggctgtgctgtgagcctggctccctcctccctgtggaggggccatgaccccggctcaggtgacacagcacctgcagcacgagccgccacctgcctggcctgctggtgacaatattccccgagcagcgggcaggctagggggcctcggttcaccggcccagcctcgggaagcccagagagagaggtcaagtgtgctgctgccaggcttccagaagcttctccaatttctgcggtcccagcaacttttggtacggatctagggcagtctgacccctgctggacccctcacaaatgccgggtcccgtatgcacacttgaaggtcgctgccaccacgagcaaggccttctgcccttggcctgttaggggccttggagactctggagaaaacccccagtggcaccactgggcccaagagccaccagcagccagcgccattgtcgccactgtgggttaagaactaccctccctctactgtgggttaagaactaccctccctctcccacttaccttttaaaaaatgcctataattttacaaaggagaaaatgtgaagtcttttttttttttgagaccgagtcttcctctctcccctaggctggagggcagtttggacgatcttagctcactacacccccacctcccgggttcaagcgattctcctgcctcagcctcctgggtacctgggattacaggcacccgccaccatgctcgaccagaaaatgtggtcttttacatatcaaggaaatagtaactggctggaaagcaggaaagagcatcaactccctattagactcatcggagccgaactccctgttagacttatcggacccgaactctgatcttgatctgcacttcaaccagtggcctcagcccactcccctggtcttgcatttgtctcactgtctcccctaaagacatcccttcctccccttcaccaagcatgtcccccttggggtcagccctcgcctggactattgcagtagcctccaggctagtctcagctaccctgtacaccctccaaataggccacagagtctttgtctcaaacacaggccagacctcctgcccttactcaaaaccctaccatgggcctctggtggccccaggattaggtcttgacaccctagtctggccttcaggatccttcctgttccagcttggcctgtctctccaacccaccccttaccaccccctgggtcattaagagcataggctttgtagttgctgtgtgaccttgggcaagttacttaacttatctgaaccttgatttctcatccatgaaagtgaaataggtctctgccacaaggggagcagggtttcaattgtgcgattccaataatctcatgtgtgtagcactggactaggatatacagtgggtgctcaataaatgtagctatccttatttgtcactaccccatgaaacgactaaaaatctcccacagcatactctgcggagcctatgcagatgctgcgtcctctgcctcggcagcctagtgaactcctattaatccttcaacacccctctcaggcaatgccctgactggcctggtgtcagctgtcctttctcagaaccctcctccatattggccagattgctgcactagaattcttccctttacttgtcagtcttccaccatatgactgtgggttcctaggggcagtggctataaatgacaaaactgagccagccagggagggctggggtgatgagggaaggggtatgagacaggaaggagggaaaggtggagggagagaggctctgtggttggccaaggcagaataaagctttcattcaatcatttgttcattcacccattcattcaacacatgcatactgacctactctatttaaagccccttgctagctttccccagcttctagaatcactccaaaatctctcggccaggtgcagtcaagtattttgggaggtcgaggtgggaggatcgcttgagtccgggagttcgagaccagcctgagcaacatggcaaaaccccatttcaaaaaaaaatacaaaaattagccaggtgtggtggcgcacacctgtagtcccagctatctgagaggctgaggcgggaggatcacttgagcccagaaagttgaggttgcagtgagccgagatcgtgccactgcactgcagcctaagtgacagaggaagactgtctcaaaaacaaccctgtcctccatgggtggccctcgaagccccaggaacccagtcctccccagtggaccgctccaccctcagtctccctgtccctttctgtccctccctgtgctccaggactctggctcccctttggttcctcaagcaagaccaccttctagaacgcccttcttctgacctttccaggacgacccccaggacaggcccctatcactctgtataaacagggtctcacccccacagcgcgggttccgcctcagtcctgtgtctcctacctcattctcacccagcccacgcccagacgcacttgtgggatcaggggattaacacccaccttctcagtaggctgcgagcttcccacttcccagcatgcctgtggtgactagcgcccacccggagcgccccaggagaccagagccaaaagggaccttggtgagcatcgaggtccgcccccacgtgttgtaacaacaataataaaaaataatatttccaacaacaacagcagcagctaacactgcccacgtgccaggcgtttcgccttccgtgcagtttcctcgaatccacgcaacaaccccatacagagagctccagttccatccccatcttacagaggagaaaactgaagctgggcaaggctggccaggcccctgggttgcaggccctgcactcttcggtcaccactaggctgtgctgccagatgaccatggtggcaacactggacggggttggggctccacagacttgagctctgtgatcccaaacaagtcctagacctttctggcctcagtctccccatctggaaaatggagctaaccacagtctcttcatcagactgaatgttcacaggagggagggactgtcagggcttccaagtacagagagaggggacgggtaccatgagggcaggattatgggggtccccagggcctcccccacaggtaaagccccacccaaagccagttctgcccaaggcctgctccaagaggacccctgcaaggcagggtgagtggagtcctccctggggagtgcccagtgcccacacactcccttctagagaaagaagacagcactgtgcacaatgagaccaggggacccggggtgtgtgggggccaccaggtggggcacagcacaccctccactgaaccctgagccatggggaccctgagcgctcccagccctcctgacacctgcttccccttgccacatgggccctggcagtgggaatggggcgtctgccggagcctctcctgggctgtgccaacctccctatgcccagacaaagcccccctcccccggcctccggggaaggggtgggccagtgagggagctgacaaagggagccagtggggctgtgcctggggctcgtgccaccccactccccgacctgcccacagtgcccacatccccctcctgccacttggccggctggggcgcccggcaccgttgctatggcggcagctctggggaagctgcagctgggtaattattgcgaacatccatcctgcctccagcccgccccaagagccgggcagcgagcagcggggccagggcagcccctcctcacccgccgggcagccgcaccctggcctggcacgatgcctgcccgaggtacagtggggaggacagccatgcaggctgctgcagcagacaggagccagcccaggggctggccaggaaacccccactttcgccctggccccccagccctgggccacccttggagctgaccggccggcccagaacttattttttccagctataatacacacaccaaaccagccagagaacctcctttgttcaaacagaatccttcctctgccgttttgggggcagtggaagccaaagcagccagaatgggctctggcctgtcacctagggacggtcccctcgatgaggcggttcccctggggccccactgtgggccccgccacctcctcagcctcagaagctcgccttggccctggtgtctaaatatagctctgccgggccaagcctgaggtctcacactcccaactgccccgggtggccgggggaggagattcattcaggcctcgagagagcatttcaggagccacttagggctgagctcagggcccccactgtgacgcaggtgtgcctctgcctgtggggcttgcggaccccctcaggagacacacagatatgattttgagtagctaactcgatcgagaaaacacagaccaggactcccctcgcccagcctggaagcaggatgcgtcagggcgggagggaaaggaaggggtctaggctggggaggggaggcaccaaggggagagagaggaagtgtggtctggcgctggaacagatttgtgtggtagaatgtggggtgcgccccagcaggacatgggctagggagcagtggccgggggtcagcagggtgcagagcacagggatgccgtctcttctccttttggctccactgcccctcagggccctgcacaggctggcactcggcaggagataccgctcagatgttattttccaaagaatcccgaggccgggcacgctgactcacgcctgtaatcccaacactttgggaggccgaggcgggtggatcgcttgaggtcagttcgagaccagcctggccaacatggcaaaaccccatctctactaaaatacaaaattagttgggcgtggcagtatgtgcctgtaatcccagctactcgggaggctgaggcaggagaatcgcttgaacacgggagagtctcccggtgagctgggatcacaccactacactccagcctgggcaacagagcaagactccatctcaaacacacacacacacacacacacacacacacacacacacacacacacacacacacagagagaatcctggtggccagagtggaagtggaggcagcacaaaggagggggacaaggtggcgggagcagcaaggggccacgggcgaggcaagggtcccctggagctgcaggtgagagaggaaaatgaaggagaatccacaggacatgggggatgagagcaagggaaggattcaggctgcctgtgcccctccccagaccttggtcatcgagccgctgaccagggccctgcttgggggacagacactctaaaataaaagggtaaatatctgttgaaagagagcccggcccctgctcaccaccagacattagggcctcggggagaaggccttctgctcagctagtgcgggtggagggagagcagcctggtccctggcacagccttctgggtagggactgtctcagcctcaatggcctttggacctcccactttcagtcccagcaataaatcttcccaacagcacacggttttctacctgaaaagctctttccatccagcatcctctgctagcttcaaacagccctggcactgggccaggcagggaggcacagccattgcagaggtgaggaaactgaggctcagagaagtgaggctcagagatctgcccaggcatggaaaggggagggaccatgactaagcacccactaagttacaggggcctttgcaaacatcacctggggctgcagctagaaggcggagagtagaacttgaagtcaggagtagaacttgaacttccgactgattccctggtcctgggctcccctgtcctcctgagacagaggctaataggagccaagacggggccattccttttagcaccatgttttctgagaatataagctggagagggtggggcaggaggtctgagacaaacaaaactgcactttggaattatccagtctgactgcaaccacctctatcttacagatggggaaactgaggctctggcctggcccaggcccaaagaacccactgtttcccagatcttggagtagctgagactgggtaagtaagtcccactgatcccagagctctttttggatccagctgtccacacagcatctggggttttaattgggtattttggggaaggattctgaatgcaaatttggaagagagctctgggccagccctgcagctaatgtcagccatgggaactcacaggccactgggttagagtgatgtggatcaggtgtgatgcagaggagcatgtgagaaccagcaccagccactggtaggactcgcattagtgcaagtgaccacaatggtgggtgccaggcaccataagggagaagatggtggtggggccttcaaagagtgcctggagcgtggcgaagcttccgggcggcgtggcgaggcttccggacgtcgcactacgactgttattgtccttgtccctctgcaccagatctccatcctggctgtttttcacagcgtccccagaaagactctgtgagggaaggtctattattatctccattttcaggtcggggggcatttagatgggagagaaatttggggactgggggagttcttccccttctccctgaaattgccccaggccggggaccctgtctcccacccaccaacagggcaagccaagatggttgaaaagttctccttggcccagctttaaaagccaacccaacagagtgattggaagtccaagagtaaggagagcttagtttggacttcccagaaggcaagtttttatataataccgatcacaaatttggtacccgtcctcttcagtagtgccaggggttcagctgggtacctatcttggagaaactgctggagtgcacagtgaggcctgttcagggctgtgtgtgggagtgaaataatggaaatgtccatttataggccagagggcaaataaaggatggaccagctcacacacagaacactgcacagcacggaggaggaggcaggtctgtatgcactgactcagaaatgtccatgacacgttgttcagtgaaaaagaaggcattggccgggcgcggtggctcacgcctgtaatcccagcactttgggaggccgagacgggcagatcacttgagcccaggagtttgaggccagcctggacaacacggtgagaccccccatctctacaaaaaaaaaaaaatacaaaaattagccaggcctggtggtgtgtgcctgtagtcccagctacctggaggctgtggtaaaaagattacttgggcctgggaaagcaagggtgcagtgagccgagatcacaccactgcactccagcctggggaacagagtgagaccctgtttgaaaaaaagaaaagaggaaaggaaggaaggaagggaggaaggaagggaggaagggagggaggggaaaaaaaaatagcccgggtgcggtggctcacacctgtaatcccagcactttgggaggccaaggcagaaggatcatttgagctcaggagttcatgaccagcctggccaacatggtgaaaccccgcctctactaaaaatacaaaaattagctgggtgtggtggtgtgcacctgtaatcccagcgacttgggaggctgaggcatgagaatcgcttgaacctgggaggcaggggttgcagtgagccaagattgagccactgcactccagcctgggcaacagaatgagtctctatctaaaaaaaaaaaaaaaaaaaaaaaaagaaaaaaagaaaaagaaaaagaaagcatcttgcagaacaaaacatacagaatgttactactcacgtgagacgcatacctaaacacaatatgcacatctaaacagatataaatatagatagtctaggtataggtgttggtacaggcacgacacaggcataggtagtggcataggtatagttacagatattggtataggtattggtataggcatggcataggtataggtatatacactgaccagctgacaacaatggtttaaacagaatggggctcaggaggtaaagaggaattacatggccttttattcactacattttattaatgtttgagattttacaatgagaatattttcctgaaatattcgtctgatgctaaaaattaaagaagaaaagcagctggccacatggctgggagcctgaagcagggctcagtctgggcgctcataagaggcagggtctgtgggggtcaggcctgtttggtagtctcaagctacatctggagactcttcctaaatccactgtggctccctctccccaaggccagagccagagagagctggtttccacagcagcagtagcatacgcaggtccctgcaatctggaggtatgtgacaccgggacatttaccctgtgcggtgggcccacctctgccacctctgctccttgaggcagggcaggacttcagaattggccagagggcgacctgagacatgcaggcagagaagggagccagtgacctctaggacccccagggcttaggcaggatgccgcgtggaacccagagcagtctccccagcctgggcttgcatttgagcctcacaaataccgcactgggggaggcaacagcccgtctgtgcccctgcactcccagcagtcagcaaggtcaggagtgggagaggggagaaggcctttcatggagcactccttagatgctgggccctgagctagacacatttcctactccctaactttggcctttaaatctcgttcagtgagttctttttgacacatggaagcttgggaagtttttcggccagctactgaaaacaaaggggtaaaataattcaaacaaagcaaagggatgtacagtgaaaaacaagtcttttctcctcagcccccagtccccgcccgggagaacccatgtgcgcactggagcacatgcacgtgtgttcctgccccctccttggtactaacagaagcgctccccacaaagtgcgctgtatctggcctttttcacaaaaaaaacatgtatctcagagcttcttccacagcagtacacgggaccgcctcgttctttttcatgcctagaattccatggcatgcaaaagtctttagtattcatgtaaccagatctagaattctggctccatggttttctgccttttccataggcttatttctgttctgcacaacagccctgggaggcaggtggtccctgtgttagagatgaggaaaccagggtgacgggattagtctgttctcacgctgctgtgaagaaatgcccgagactggggtaatttataaagaaaagaggtttaattgactcacagttctgcgtggctggggaggcctcaggaaacttacaatcatggtggaaggcagctcttcacagggcggcaggagggagagtgatactgagcaaagggggaagctgcttataaaaccatcagatctcgtgagaactcactcactatcatgagaacagcatgggggaaactgccaccattattcaattatctctacttggtcctgctcttgacacctagggattattaaaattcaaggtgagatttggtggggacacagagtcaaactatatcagtgactcaccatcccagtttgcctgggactgtgccaggaaaaccctcagttttggacaaaccaggatggttggtcaccctaaaggtaaactgaggcttggagggtaaggacattctccaagatcttgtggttgatccgtggaggcctgggatggccactgaagtccacctgatggtgatgatactctaggaggacaatgatcatatagtaagtgtctcctctgtgcctgccccttcttcagccctcataacagccccaggaggcagacaacgaggcacagatagaacttgtgacaggcgaactggggtcagatctcagcagcagggcttggctgtgtgaccactgtggtcagctccttctcagcctcctgtcctgggcccacagcagacatacaacaaatgtttgttgaggggaaaaaaaggcatgaatgaagtattattatcctcattttatgggaaaaactgaggcacaaagaagctgtccctggcacagggtcacaatttgaacctggacaggggctccagagcccatgacacgtttccctcttgtagaaggtccttgtctgtaacctggtggtgcctcctgcctctgactcctccggccagtcgccctgacagccccctcaccgcgttgcactacctggtcccctggtcccagcctcctttcatggaaggaggtcttgccgtctgcctccctactcctgacttggggcccctgctctgaaccttccaccccgtccgcctggactggatgcttctcccggatcctgatgcctgagcttcagcttccccactccggactgtttcatgcgttcattcatgtgtccaactcttcactcctttcctcaacaaacattgactgaaattgaaatgagccagttctaccccggtgttgggaattccgagatgaatccagcctgagctttgtccttgggggacacagaaaacaacaaagaaatggcacttgttacccagagacccagagagatgcagctctgatggagatggcgcaggcacgggctgctggggcttgagttcaggggttggggggaggttcctagcctgggggctctggaaaagcttcctggagaaggttatgctggagtctggaaagataagaaagaattagcaagacaggcattgggaggggaggcgagaggtactgtgacatcatggacaaagcggtggaagacagcgtgagacattcaagaagtgcacgttgttccttacagctgggtccaagctgtcctcaggtgtggacgcgtggctctaggaagcccagcaccctcccgagtacctagccagctccgggcccagcagggcttccgagaatttcatgtccagaaatttatcagaaaaaaacacaacaaaacaatcagcaatgtggacatgaagttacgcaggacggaggatgtttactgcggtgtttttatcacagaaaacgagtgaaacagcctctgtgcccagccacgagaaggggccacacttgtcaaagggccaccaccggctggagtcatccaaaaggctgaggagtcagatttcagagactacttaaaggcaccagacaatgcatctgatgtaactgtaggtaaaagacagcaagaggcaaactattttttattaggagacctacatatgcatatatatatatatatgaaatgatattaggaagaaatgtgtcaaatgcttcacagtggttatctctggtgatggactaacctgggggttgtagttcctttttaaaaataatttcagccagacgcggtctctcacacatgtaatcccaacactttgggaggccaaggtgggcggatcacttgaggccaggaatttgagaccagcctggcccatgtggcaaaactctgtctctaccaaaaatacaaaaattagccgggcatggtggtgcatgcctgtaatcccagctactcaggaggctgaggcaggagaatcacctgggaggcggaggttgcagtgagacaagattgtgccactgcactccagtctggggaatagagtgagaccgtgtctcaaaataaataaataaataaaaatgggccagacacggtggctcatgcctgtaatcccaacactttgggaggccgaggcaggcagatcatgaggtcaggagttcaagagcagcccgactaacatggtgaaaccccatctctactaaaaaatacaaaaattagccaggcatggtggcacatgcctgtaatcccagctactcgggaggctgaggcagaattgcttgaacccgggagatggaggttgcagaaggccaagatcgcaccactgcactccagcctgagtgacagagtgagattccatctcagaaagaaaaataaataaataataataatcatttcctcggctgggcaccatggctcatgcctgtaaccccagcactttgggaggctgaggtggggggattgcttgagcccaggagttcaagaccagcctggacatgaggataccttgtctctacaaaatacaaaaattagctgggcatggtggtgtgtgcctgtagtcccagctactcgggaggctgaggtgggaggatcgcttgcctaggtgacagagcaagaccctgtctaaaataaacattcctgtgttctctgattttgtaatggtgggccagtctcacattttcattttcagagacagattctaggaggcaactccatgaggccacaacttctctttccagcatcctcctgagccatgcctcccagcccagcaaaaacccccagggagccacccggaatgacgtgtcgtcctcccatcccgtgtacagtgagcccacgtgctctgactcctgccgttcctgtctgaatgccctctgctttctctctccatctggcacagttcccccagcccccaggcccccctcagggtccttccactggggaggtcatgcacaccgagcacccttgccactgaacaacgggtgtgcatgcccagatacttgcctggatggtgagctgctgggggaaggacctgccttacctctttcttccccaggggctttatagggcccaggatttatttctatttgtttcccgcctccaatatcttatttcgaaaatgtccaaaccaaagataatggtataatgaacacccttcgcttagatttgccacaatttgctttttctctctctctttgtcttgctgaactagtgcagacatctgaacacttggccagggctggggatttggaaggtgcttaacgcctgctggaatcaacgaaagggagagcaaggacacggcgctgctcccctctgcctttggccccagtggataaccttgcacagcaaagcgctggcctttctaaaatgctaacacagaggagctgcccacctacttggaggctggctgccaacagtcagcacagcccctctgcagacacgcaaggcccctgtcatcccttcctgcctcatcgctcactgagccctggaagacagcctcgtcctcacacccacctgcgccccccatgtgctgctggacttgggccatggaacctctgtcctccccgctcacccagggagggcatatatctcttccatgtcccttgcaaacctgacatcctcagagaagtggaggacttccctgatatttcctctgccccttggcaccaagggcagcctctgttggagtgacccattcatcctggtctgcccaggactgcccagttttagcaatgaaagtccagtgtcctggaacccctcaggcctgggcaaaccaagaggactggtcaccctggcttctgttgactctcactgggtgggcaggacatgttcacactcccactgccgggagacagcagcctgagagtcaccaggggcaggggctgggctgctctctacctccccaaccctgccaaggccaggccacagaagaggcccaaggacaggcttgctgacgctggctcactgcctagaggaaagaagaaatgaaccagcacagggctgggtgcaatggctcacgcctgtaatcccagcactttaggagaagggcaaggcaagtggatctcctgaggtcaggagcttgagaccagcctgaccaacatggtgaaaccccatctctactaaaaatacaaaaattagctgggcgtggtggcaggcgcctatagtctcagttactggggaggctgaggcaggagaaccgcttgaacccaggaagaggaggttgcagggagccaagatcacgccactgctgcactccaacctgggtgatagagcaagactgtctcaaaataaaaagaaagaaagaaagaaaaagaaacgaatgagtagacaacgaaacagtaatcttgcctccttcaaatctgctcagatgtcacctcctccatgaggccttccctgactgccatctcagatgatagcctccccactccccacccccactttacaggcttccctagcatgtatcactgactgacattctccatgtcatttgttcactttcactagggtccgtctcttggactacagtgtcagctccacatgggcaggggtttttatctgttttgatcactgaggtatttctgatgcttagaataataggtgttcagtaagaattcattgaatgaatgaatccttgctttcctgcaaaagatggagcctcctggccttctcacacatttggtcttttgtttaatttgttcaacagacatcagtgccctctgcgtcactgtgtgtgcatgcatgcatgtgtgtgggtgtaggtgtgtgtgcatgtgcctgtgtgtgtgcctgtgtttgtgtgtgtgcaggtgcatgtatgggcgtgtgtgtgcgcccatgtgtctgtgcgtgtgtgtgcattgtgtacttgttgtttgcatgtgtgcttgtgtgtgtgtgtgtgtgtatacaaagcagagtgcccaatctgatggcaggaggggcagaggccagggtgaggactcaaagagccatcatgcctggttgtatgtgaagccaaggacctggcatttgggggtgggttctctggggcaggaccctgagctctttgcaacagccttaaaagaaagcctggactgtaataaccatggccaacatatattgaacacttgctatgtcccaagcactgttctgtgtgcttcatgtatgttttctcagttaattctcaaatctctgacatgtaattgtccccattttgcagatgaggctggggagcctaagtgacttgctcaggggaccacagcaagaaagtgggggtcacagtcagactctggagggtgctgctaaccctggtgctggagactccatttgcagaagaggaaggaggatcagtgaggtgaagtcacttgcccagggtcacagaggtggtctgctgagatttacagcaggtccaggacaccagaggagtctgaggtcccacttggtggccaccctggaagaggtgagggtaaccaaagggaagaggacagagacccagagccaggcaggagctgtgcttgaatgcaaaacagctgcacaaaactggaggacaggagggaccgggtctgactggggagatggaggccaacttctcagcaaagctgtccttgcttcctcttctctcctgaaaaatggccacagaagccgtggaccacctgtctccaggcctccacatgggctggctgccatgcactggccctggagagaagcagaaagggggggcgggcagcatcccctgtcccaggcccctcctcctgcgctcccggcaatgtcggcctgactcacctggtgataccaagtgtatattctgtgtcaggagctgcggtgtgcaactcaagatgctctgacttacttaattcttacacccaacaagttccaacagggaaacagagttcaggcagcgaggtagctgcccaagccaccagcagagggagggtacaagccccaactatctggctccagagcctgtgcctctagcccctacccaggatgcagagccctggctcccctggctggcctggctctccgccacgagcctgtgtagtccctgacagcagacaccacccacagtgttccacagtccagcaaagggctcagcacacagcaggctcagctgaaaacaatccttgctctttgagatatgggaacagtgacttcttcctttggatgtttctccctctacccaagtctgggaaacagtaacagtctcagttggacagtaccaacacctttcaaagctgcccctccttggaaggccaagaagtgggcagaacatgggcttccaaccaggccaacctggaaacgaaccccagttccaccctgcaaatcactgcacctccctgagcctcagtttcctcatctgtaatatggggttcataagtgtcattatgaggagcatggtggtgttggcctgtagtcccagctactcaagaggtgagggctggaggatcgcttgagcacaggagtttgaggccagcctgggcaacatagcaagaccctgtaacaatatttttttaaatagtaaaaaaaaaaaaaaaaaagtcaccgtgaggattaaaggagacaacaagagctggtgccaggcacacagtgggtgtgctcagggagggtgtatctgtccaccgagcaccatggccacctccaggctctcccaaggccaccttggccactgcccccctactttgaaactatggctatgtaaatcatgatatgtttgaagcatacagaacacacagaaatgagctgtgcccggtcagagcactccactctggcacacacgtaatcataacaggcccttggattcctgagtgttttccaagggttggggtctgtaccatgtgccgttcgtgggcggcctgcttcctttcattctcacgacttcctgtggaggtgggtcctcggttaccccaatttataaatggagagactgaggctccaagaggtcccacagccagggagtggtggaagtagaatttgtttttatgtagatgtgtatttattgacatcaaagatgtttaccacatattattaaatgaaaagcagtccataggccaacagagtataatttgggagagtatcattaaaatattaacagtagttatccctaggtgataggatcaagggccttacaattcttttctttttttctgcttatccatattttctaatttttttaataacagctttgttgagatataattcacatcacatacaattcccctgtttaatgcatgcaattcaatggttgctagcatactcacagaattgtgaagccatcaccataatcaactttagagcattctcaggccgggcacagtggctcacacctgtaatcccaccactttgggaggccaaagtgggcagatcacttgaggtaaagagttttgggaccagcctggccaacaccgtgaaaccccatctctactaaaagtacaaaaattagccggccatggtggcgtacctgtaatcccagctactcaggaggctgagataggagaatcacttgaacccggaaggtggaggttgcagcgagctgagatcacgccactgcactccatccagcctgggcaaaagagcgagactctgtctcaaaacaaaaaacaaacaaacaaaaaaaacaaaaacaacaaactttagagtattttcatcattcccaaaagaaacctcctgcccattagcagtcactccccattttccagaacccccctctccagacctaggcaaccatattctgtctctatggatttccctcttctggacatttcatacaaatggattcacacagtatgtgatctttgtgacaggctcctttcacttggcataatgttctcaagcttcatccgtattgtagcatggatcagtattttattccttttcatggccaataatatccacattatatctgtcaattcatcatattgaaagacattcaggctgggtgtggtggctcatgcttgtaatcccaacgctttgggaggccgaggtggtcggattgcttgaggccaggagttcgagaccagcctgggacacatagtgagaccctgtctctacaaaatacaaaatacaaaatattatctgggtgtcgtggtgcatgtgtggagtagcctttagtcccagctactagggaggctgaggtggaaggatcacttgagcctgagggtttaaggctgcagtgagccgtgatcacgctattgcactccagcctgggtgacagagcactcaaaaactcaaaaaaaaaaaaaaaaaaaaggaagaaagaaacagacattcaggacaactgggctgttttcacgttttggctgttaggaataacgctgctattaacatttgtgtaagtctgtgtgtagatatatgttttaattctctcaattatatatctaggagtggaatttctgggtcaaatgataattctatgtttaaacttttgagaatgtgccagactgttttccaaaatgactgcactatcttacattaccatcagcggtgtatgagggttgcaatttctctatatcctcaccaacacttgttcttatttgtcttttttattctagccatcctgtgaatgtgaagtggtatctcattgtggttttgatctgtatctctctgatagccaataatattgagcacctttcatttgctgattggccatttatacatcttttttggagaaatatatgtttagatcgtatcgccatttttaaaattgagttatttgtttttgttctgtttctgtttttgtttttgtttttttgagacagagtctcactctgttgcccaggcaggagtgcagtgacacgatctcggctcagtgcaacctccacctcccaggctcaagtgatccttccacctcagcctcttgagtagttgggactacaggcaccaggcacacaccaccacgcctaatttttgtattttttgtagagacgggttctctccatgttacccaggctagtctcaaactcctggactcaagcaatcctcctgccttggcctcccaaagtgctgggattacaggtgtgagccactgtgcccaaccaaaattgggttatttgtgtctttattattaagttgttggaagtagcatttagagccaggtctggcccttgctttactatcaaatggtggacactgcacacacccccatggcatatgccccaccgccagggacatcttgaagccccctgcagacttggccctgctctgagcaggtggaagagtaagtcctgctggggcctggcccacaagtgtccagtgaatgtctatggatggacagacagacaagtatatctctaggaacgagtaagccaaaggggaagaaaaaacacacagaccaagaagtccacaccccaggaggaagaaactgctgaggcccagctccaggaggtagagataacacttttggcgcggcgagaggccaccaggcaactgcctcttgtgtccttggtggcagtaatctatctggcctgtttttacgtgactgactattggcctgtctgaggctgggaaggagaggccagggagattagcagggaacccataagcctatctgtctaggggcttgtaaggggggcagctggtcagaggcgggcagggaactggtggggtgtgtccctgccagcctctggccccagaaactcactgcttcatcaccaagggcgcctgcatcttgaacacccagctctggattctgactacctgggtttgaatcccagccctaccatctccttgctgtgtaaccatggacaagttactctccatctctgagcctcagttcactcacagcctcacctgtagaatggagacaaccagagtgagaacgaaatgagaccctaaggctgtgtcttggtggggccaggctgccggtgggaggctacagacagtgggcaggagggctcacccacagggcatccccagaccctgtactcagagcctgtccccttgtgaaatggagtcacagactctcctgagaccagccgccgcatgaaggtgcacctcggcccagtgctgtgagaatgtggctgctggtggaggcagctccaagaacctgtgtggtaaagacaggctgggagggggtgccagggcagcctctgactcaggcagcctgggatcagtgtcctactctgtcttttaccagctgtgaaccttgggcaggcacttggcctctctgtgcctcagtttatcctttggaagacagagatgacagtcatgcttactttatagggtggctgtgaagattaaatgggttaatagaggtaaaatgccagttaaaatctcagccttaaaataaagcccagagcatctcctgaattcatttaacttctttgaaccccagattctcccatattcccccggattcatccagctgggctgtgtggaggacgggaaagtgttagactattctggcatttcccaaagtggatcccatggacttctaactcacgggatgctctaggaaaataaaaaagggcaccattgtcacataggcctgggtgctagtgtagacccagccgcttcctggaaccacacacacacacacacacacacacacacacacacacacacacacacacgaaagtttctgcgaaaccctgcagtgaagagctctgtggatgtttgcgttgtttctcaaatttatttgacgatgaacacccttttctgcccaaggtcgatttaacatcctcctagaaaacaatgatggtcaaggtcatttctatcttgcagcttccgtgaatcacagaaaagatgggaagatttgctaaaaatcatcatcatcacctaggagaagtgcctttctgtttttaaaaccctttcacactcaccaccatgaaagcatcatggccctgtggggcactctcagccctgccacagggatcagagagggtcagagtgggaaggccacaccagggataccccacgcccacgactgcccagccaggactggcccaggtccctttctaccccgcacagctgcctctggctaccccaaaccagacagaatacccagaaggttgtcaggacagaaggtggcgtctgcgaggagccttctagaaaaaggagttgtagccaggcaccgtggcttacgcctgtaatcctagcactttgggaggccgaggcgggtggattgcctgagctcaggggttcaagaccagcctgggcaacacggtgaaaccctgtctctactaaaatacaaaaaataagccaggtgtggtggcgtacacctgtagtcccagctactcgggaggctgaggcaggagaattgcttgaaccctggaggaaaagattgcagtgagctgagatcgtaccactgcactccagcctgggcgacagagcgagactccatctctaaaaccaaaacaaaccaaaacaaaacaaaacacaaaagaaaaaggagttgccaaaaagaagccctatgggttgagccagcccagcctcaggcaagggagatgtcaaggatcaggagtcccctgggggcacctgcaggggaggccctgtgaccctgagcctaattaattgggaaagtgccccattcaagtagcccctcacatctccctgtaaacatctcagcaaatctaacatccagcaaccagattacatctcccagagagtggcctcttgaacacaggacaagggccaaaattcttccctaggccctgcgaggtttggaaaatgagcttgatcagctagtcaagggaggagactgacatttattgagcaccagtgatgtgtcatgcatcgtgtacctgtatggtgagatctcaattctgataataatccctcttcacagatgggggaaactgaggctctcggtggtaaattaacatgtccagggatgcagcagggctaggattcaagctccaagattgggtttggctcgccagccccagtgccaccacacgccccaaaccctgtgccacacctcgctctccaggcccccttcccattcctaagccaggttctcagggcctcagatataagaggaattggttggggggctaatgtgatctggcccctaacagcctggcccacactgtggatggagaaactggcacttgggtttgtcgctcgatgtcctggagaatcgagctctttcagcccctagtactctgatcatctgttcagggaagacaggtagagaaatccattttctgggtatgctaagccaaaggccatgcctaagtctttgaatgctgtgatcattcccagctgccctcaggtgcagcctcctgcctggcatcccgcccggctcactgaccttccagaatcctggcactcaggctgggggtgtatggaggggaggggggcccatcatacaaacctctctgcaaaacccctattcctctccttgatgaccctgcccccctggggggatattctcccaaactgggacttcccagaatttctgggtcagcaaacagactggctgagtggctgcaggccactcctctcctgcgagacctctcccctgcactgctgcacgtcctcctgcccagcgcagaagcagacattggagaggagagagagccagcaccaagccctcccagctttcccaccacactgcccatcttcaagccctccgagcttttccaccataccacccatcttcaggctgtctgagaggcaggctttctttccttcatccctggcagcagatccaggtcacagaggggcagctacttgcccaaggccacacagtgaggcagcagtgggcatcacacctgggtctgactcactccagagttggggacctttttcccagtccagtacagtggccagcagtgttgaggatggagaagtgttagactattagtgtgagatctggagcctgggctccccagcttcctcactgggtcacttggggtagacacctcaacttctctgtaccccagtttctccatctacacagtgctatcagagagtccctggcttcaaattctgtgtaagttgtgtggccttgggtgagtcacttaacctgtctgtgtctctgctttctccaatttaaaacagagtgggccttaaggtaagggtcagtatgaggattttttttttgagacagagtcttgcttgatcccaattttttttttttttttttttttgagacaaagtctcgctcgatctttttgttgagacagagtctcgctcgattttttgagacagagtctggctcaatctcagctcactgcaacctctgcctcctgggttcaagcgattctcccacctcaacctcccgagtagctgggattacaggcacatgacaccacgccttgttaatttttgtatttttagtagagatggggtttcaccatgttgcccaggctggtctcgaactcctggcctcaagtgatccacccgccttggcctcccaaagtgctgggattacaggcatgagctaccacgtctggcctagtatgaggattaaactgtgtgtcaagggcttcctagcaggtggtgtctagaaggcccacactgatggcctgctgttgtggtcaagatggggctgtctaggctgactccagaaggaaacacaaggaataggccccagaggtcatctccggggagggaaacagttggggaaagggtgggagccctaacttgtccctataggttgtctgccaccttcagaattgtgtattgcagtcacgcattattactgttaccacagctgattacatgatgactgcacagagctgctcccctggcctgacacatgcactcatgctagccagaggccccatgcatgccttgggtgcccaggccagctcctaccacttgcttggctcatccctccacagctacacccatgcctcacccaggcccttttcaactaccccatgtctcccagcaagaccatggcacagccttgagggccaggagggtctctccatctagcacacactggtcactcaccacatgacacttgatgtgagtctctgtcctccattgtctcactcataagtggagaggctcatgcctcccccagggtaactataaggattaaaataaagaactagggccgggcgcagtggctcacacctgtaatcccagcactttgggaggccaagctggatggatcacctgaggtcaggagtttgagacccgtctggccaacatggtgaaaccccatctctactaaaaatacaaaaattagccaggcgtggtgacgtgtgcctataatcccatctactggggaggctgtggcaggagaactgcttgaacctgggaggcggaggttgcagtgagccgagatcctgccattgcactccagcctgggagacaagagtgaaactccgtctcaaaaaaaaaaaaaaaagaagaactagggtttggcttggtggctcatgcctgtaatcccagcactttgggaggctaaggtgggaggatcacttgaggccaggagttccaaaccagcctgggcaacatagtaagaccctgttgctacaatatattaaaaaaattagctgggtattttagcacacgcctgtagtcccgactactcaggaggctgaggtgagaggattgcttgagcccaggagattgaggctgtagtgagtcaagattatgccactgcactccagcctgggtgacagagcaagaccctatgtctaaaaaagtaaaatggagaactaatgtgtggaaagcgccagatacagttccccacccggagttgaaagggtgaaactaccacgggtcggggaattgctcagggtcaggtgcatagcctggagtgcaggagtgttggtcccagctccttccccagcctcaccacccacggcagggggcgtcgccttcccccacccttccaggctcagagggtgtcaggtccctcatagtatctccccaatccattgatggcacctacagcaccctaggcaagctaacccctacccacttctctcaccctctgtgccctctgaggagcaggctttcttcctccatccctggcagcagatccaggtaacagagatctgctacttgggctacttgcccaaggccacacagtgaggcagcagtgggtatcacacccgggtctagctgactccagagttggggtcctttctcccagtccagtgcagtggccaggggtgtgggatctggagcccaggctccccagcttcctcaaacagcctaagcccatcctgcctccaggcctttgcactccccattccctcctccttccctgcccttcccatcattcaggttctgctcagctttgcctccctcagaggctctcctggaccacccctcccgaaatgccccaatccctattctctctgtctcttgcccctgattgtttgcttcatggcactaaccattgcctgaaactgtcttttttttttttttttttttttttttttttgagacagagtctcgctctgtcgcccaggctggagtacagtagtgtgacggtggctcactgcaagctccgcctcccaggttcacgccattcttctgcctcagcctcccgagtagctgggactacaggcgcctgctgccaaatctggctaattttttttttttgtgtgtgtgtttttagtagagacagggtttcaccatgttagccaggatggtcttgatctcctgacctcgtgatccgcctgcctcggcctctcaaagcgctgggattacaggtgtgagccactgcgctgggccaataaactttctttagggaataacttagaaattattttgcaacagaaaaattgcacagatagtacagggagttcctattggcccttcaccaagttttttcttatgtcaacctattacctaaccatggtaagtggtcaaaaccaagaaagtgacattggtacattacactgatgagccgcaggctttactccggtgaaactgtgttcttccttactcatttgttctcagctgcctcccccatgaggaggcaaactctgaaaagcagggaggttgcctctcccactgacatcaatttcctcatacctggcaaggagtgctgattggataaaggagaggaaagaatggcaaaaacagccaatgactatcaaggactcctgccagacagtgttcctaagtgctttaaacactgtaagccccagcctgggcaacatagtgagaccctatctctacaaaaaatttaaaattagccaggtatgggggcatgtgcctatagtcccacctaccagggaggctgagatgggaggatcgcttgagcctgagaggtggagcctgctgtgagctgtgattgcaccactgcactccagcctgagcagcagagtgagaccttgtctcaaaaaacaaaacaaagccaaacaaaaccagacccaacacatagtaagctgtttaatcctcacatcagcccatgaagcagctatgaatcataggggaactaaggcatggtacggtttggtggctggcccaaggccacagagatgggcagtaccagagtgggtgggttctagcacactcctcctgcccctgtcacaacacgctgatggcaccacagggtaacacagcaaatgccagtccctccatgttctcagtctacgaaacagtggaagggtcacacctcccacagcccagcaggagcacaggcttgggatggagcctgagcctctgcttcttgcttctgcccacagtgactagtggctatcccggccctgcacagaatgacacaggggctctgttccgagggccctcagcctcacccttcttcagggaaacagaagggggctggttcggccccggaccatgggctcccgccagtgctcccaattccccagaccctgccgacacaaagcaggcctcagcccgccccgctcccttggcccacagcttggactgggcctctaggatctggctgctgagggccgggtgcagagcatgggcccctgtcctgaggtccagcattctcagaggagctttctgggctctggaagagagaggaagaggaagacatggtgtccctttccggatgtggggtgggagtgacacacaggagtactgcagcctcctcccagcactcagggaccaagccagagagatgtgccagcgcctcccaagggagaagccattctccagcagctggacaggaccagagcctgccccgcatgtccggccggggttctacccagagccagcctggcacagcctcggtccctaatcatgtttgctgaatgccttgaatacaagcgccggtgcccagaatctccttgaggtttcagctgggcgtgccgggcccatcccccactctggggagcagaatgattgtggggggtggtaacaggggacaccctgaggtggtggtggccttggtaggacaggcaggcagagctgggggtgggggcgccctgggctcggctaattaaacagcgaccgtgatgaattggagagaaactgctgcttgctaattaaaggtgcaggcaacttgcctggcaaggatgggaggcagaagtcctggaaacatgttgaggtccaggccagcgaggacagagcttggccaaagtcccccaccgtgcccattctgggcatccctcccattgccctcccccgcccagcaggggcccgcagccccctccccacttccctatctctccgacccaccttgctgagcctgaggcctccaacttccccccacccctccccaccaacccaaatcctttcctgataagggcctgggtgttgcggaggaggaggctggcgctggtggctgggctgggggtggactcgctgagcctttgaggtcctccttcccgccccaccgccaaggtcccagaggtgggcagtgagtccagccaagactgatgtggcctgttgggaacaaggcccccaagaagatcatagaatcttagtacctgagactcgcaaggggctttaggtcttccctaatttcccaacagtccccagtgtcagcccaggtgtgggagacagggacagcacttcttacccggctcagcattccagtttttgtaaagggaaaactggccaggcgaggtggccactgcctgtgatccagcatgttgggaggctgaggcaggagaatcgcttgagcccgggagttcaagacaggcctaggaaacataggagaccctctctctaaaaaaaaaaaaaaaaaaaaaaaaattagctgggtgtgttggcttgcgcctgagggttcagctactcatggggtagctactcaagtgggaggatcacttcagcccagaaggttgaggccgtagtgagccatgatcgccccactacactccaaagtgggcaacagagcgaaaccctattcaaaaaaaaaaaggaaaagaaacgagaaaattggagcaaatgatctctgagccttgaagattcttacagggtggacaagaaaaccccctgaagctgctcatccctgccccaagtcacttcaaagcagggctgtaggctcagacacctttaccaaccaacgtgacctcaggcaagggagctcattgtcacatgcctgggtttccccatttgcaaggctggggatggcaacagagcccacctcaaagggtctctgagaagactggaggagataacaaaggtgaagtgtccagcacagcaactggtctgacctgaatagccagccactgccatctgaaaggtctggggaactggggggtgacctggcacctagcctgtccgagtcttacctcttcatgtggcagctgcagtctggcactctgaggaggaggattagagagcttaagtgacttctgcaaagccacaccactacggaagaggaagaggcagccttggatcccttgagtgaggagaggatgggacctggattcctatgttgacatttgttgagcatctactggatgcagggtcctgaacaagaccccaggaagggactaagatgaatctgagattcactctgcctttaaggggaccccagtctggaaggagagagaaaacacacatacaaataactagaatgcaaagcaaatgtggctggatgcagtggctcacacctgtcactttgggaggcttaggcaggaggatcacttgagatcaggagttcgagaccagcctggccaacacaacaaaacctcgtctctactaaaaatacaaaaattagctgggtgtggtggtgcacgcctgtagtaccaactacttgggagactgaggcacgagaatcacttgaacctggtggggcagaggttacagtgaactgagatcgtgccagtgagctgagatcatgcacttcagcctgggcgacagagcaagactccatctcaaaaaaaaaaaaaaaaaaaaaaaaaagcaaatacccctggcatcagagggggcccagcagccctccatgcaaaggggctggggtgagactcttgggatggcggggagatgctgctgtgtcttggagctcaatttgcaaggcaaaggttttgattttatttgaacgataaaatcagccctgggggtcatgggggtgctgatggagcctcctctggcttttttgggaagttctgggtggtccctgacctctgtgattcctgcttcgaaggttctgggatctatcctggaggtatctaggagtcccggatgctgtggtttttggagactacactgtccagacccccagcatgaatacattcacgtccacaaaaaacagtgagggcccccttccaggtagccagacacgcaccagtttggggggcttcctgctgctgggcaatttggtggggagaggatgcagcaccagtgagaggccctctcagagatggtggaagcctctcaaggctgagagatgcaaggctgctggccccgatgttgcaaagcctgagcctcaggcggcaacccaaagcgggcagggtgagtgctaggtcactggccttggggatggtgcctccgtcactcccttcctggagatcagagctcagccagaggagcgggctggtctagccacaggaagtctgtgcaagcacagccagcagctcctggaaaataggcgctgctctcagcctccccagggcaccctgcacccaagctgggccaaatgatggtctggggcgccctctggtggctcctctgggcagtggtggatgctgaagccactgtgaatttaagggtgggtggggcagagatggtcagagttggaagatttcaaggtggaccactctttccactacacagatgggaaaaccaaggcccagagggaagtgacctgcctacagttgcacagccagtgactaatacaagaacagaacccagaagttcctctgtaccaatgcttttttttagggggtctcaagacatcccaccctaggggagggaaggctgagtgtccagggctcactcccagtgcatatggacagctgaactgtaggtcgctgagtatctgtgtgacatagcatgcagcacttccctcccaggcttggttctttgcctctaaagcctggggttactgtgttggcaagggatgggggactaggcctcctgcttgcacactgctagaactgagggtgtaaaccagccaatctttcggggagttctaagaagagtgttcctacagctggtatcatacttcatggtgagagattgggtgctttccccaagaccaggaacaagacaaggatgtccactcttacggcaaagttgaattcacgacttgtattcaacactgtactgggtacaatggcaagaaaataaagtcatccagattgcaaaagaagaagtaaaactatccctacttgcagatgacatgatcttatatatagaaaatcttggttgggagcagtggctcatgcctgtaatctcagcactttgggaggccaaggcaggtggatcacctaaggtcaggagtttaagaccagcctggccagcaaggcaaaaccatgtctccactaaaaatacaaaaattagccaggcgtggtggtgtgtgcctgtaaccccagctactcaggaggctgaagcacaagaattgcttgaacttggggtgcagagtttgcagtgagccaagatcacgccactgcactccagcctgggtgatggagcgaaaaaaaaaaaaagagaaaatcctaaagaatccactaaaaaaaagttataactaataattgggtttggcaaagttgcaggatacaagatcaatatacaaaaatcaattgagcttctacacatttgcaatgaacacttcaaaaatgtaattatgaaaataattcaatttatactagcatcaaagagaataaaatgcttaggaataaaagaagtacaaaacttataatctgaaaactacaaaacattgtttaaagaaattaaagatgccataaataaatggaaaaataccaatgttcatagatctaaagacccaataccattaagatggcaagactccccaaattgatcttcagattcaacacaatctccatcaaaattccaacttggttctttacagaaattgacaagctgatcctaaaattcatatggaaatttaagggactcagaaaagctaaaacagtcctgaaaaagaataatggtgggccaggcgtggtagcttatgtccgtaatcccagcactttgggaggccgaggtgggcagatcacttgagtccaggagtttgagaccagcctgggtgatatggtgaaacctcatctctacaaaaaatacaaaaatttagctgggtgtggtggcatgtgcctgtagtcccagctactcaggaggctgaggtgggaggatcacttgaacctgggaggtagagattgcagtgaaccaagaatgtgccactgcattccagcccgtgtgacacagcaagatccttccccaaaaaaagaagaagaaaaaatgaacaatgttggagtgcacacacttccaatttcaaaaattactataataaactacagtaatcaggacaatgtggtactggcataaggacagacatagagatcaatgaaatataaataagagtcctgagagtccagaaataaaccctcacatttggttcagccgcaagagccgaacatatttaatggtggagttcaatggggaaaacagagtcttgcaaaagaaagaggtcagacccctgcctcacaccatacacaaaaattaaagtggatgaaaacaaatgtaggagctaaaactataaaactctgagaacatagacataaatcttcatgaccttggattaggcaatagtttcataaatatgataccaaaagcacaagcaaccaaagaaaaaatagactaggcttcatcagaatttaaaattttgcatcaggcatggtggctcacacctgaaatcccagcactttgggaggctgtggcaggaggatcgcttgagactggacactatcaaaaaagtgaaaagacaacccacaggataggagaaaataactgacaatcatatatctgataacagattctaaccagcatatataaagaacccttacaactcaataataaaagacaaatagcccagtttaaaaatgggctgagccaagtgtggtgctcactcctgtaatcccagcactttgggaggctgaggtgggcagatcacctgaggtcatgagttcaagaccaacctggccaacatggagaaaccccatctctactaaaaatataaaaattagcccggcgtggtggcagacgcctgtaatcccagctactcagaaggctgaggcaggagaatcacttgaacccaggaggtggaggttgcagtgagccaagatcacaccactgcactccagcctgggtgacagagcaagactccacctcaaaatttaaaaaataaaaatagaaacaggcagatatggttgggatgtttgtctcctccaaatctcatgttgaaatgtgatctccagcgctggaggtggggcctgctgggagatgtttgggtcacggaggtgactccctcatgaatggcttggtgccctcctcacagtaatgagggagttcttgctctgttagttcacaagagagctggttgtctgaaggaggctggcagtgcccaccctttctcttgctcacactggctcccctttgccttctgccatgattggaagcttcctgaggcctactccaggagcaggtgctggtgccatgtgtcctgtacagcctgtagaactgtgagccaaataaacctcttttctttacaaattactcagtctcagctattcctttatagcaatgcaaacagactaatgcatgggcataggatgtaaatagacatttctccaaagaagacatacaaatggccaataagcacatgaaaagatactcaacatcattagtcattaggaaaatgcaagtcaaaaccacaatgagatagcactttgtacccactaggttagttataataaaaaagacagataataacaagtgttgatgagaatatggagaaatcagaaccctcatacactgctggtaagaatgtaaaacgttttggaaaaagcctggcagttcaaaaggttatatatagagttacatgatccagcaattctgcacctaaaaggtatatacccaagagaaatgaaaacatgtattcacataaaaacttacataaggccgggcgcagtggctcatgcctgtaatcccagcactttgggaggccaaggcaggtggattttcggagttcagcagttcgagaacacccagggcaacatggtgaaaccctgtctctaccaaaaatagaaaaaaaatagccaggtgtggtggcatgtacctgtagtcccagctactcaggaggctgaggcatgagaatcgcttgagccccagaggcagaggttgcagtgagccaagatcgcaccactgcactccagcctggacaacagagtacgactccatctcaaaaaaaaaatcttacatgactagtcatagcagcattattcccccaaaatagaaacaaccacaacccaaatgtccatcagctgatgaatggataaatgaaaggtggtatattcatacaatggaatattattcagcaataaaaaggaggactaaagtgctgacacatgctgtaacatagataaaccttacaaacatcatgctggggccagacacagtggttcacacctgtaatcccagcactttgggaggctgaggtgggagaatcacctgaggccaggagttcaggaccagcctgagcaacacagtgagaccccatctctacaaaaaaattaaaaattagctgaggctggccatggtggctcacacctgtaatcccagcactttgggaggctgaggcgagtggaacacttgaggccaagagttccagaccaggctggccaacatggtgataccctgtctctactaaaaatacaaaaattagccaggcgtggtggtaggcacctgtaatcccagctactcgggaggctgaggtaggagaatcacttgaactcaggaagaggaggttgcagtgagctgagatctcaccactgcactacagcctgggcgacacagcgagactctgtctccaaaacaacaacaacaacaacaacaacaaaggagtttgagaccagcctgggcaacatagtgagacctcatctctaaaacaaaattttaaaaataaataaaaaggcgtcacatttactaacatcgatgaggtccaagatataccaccaagtcaaaagaaaaaaaaagcaggttcaaaaataagcctgtaggctgggcaaggttgcttctgcctgtaatcccagcactttgggaggccaaggcaggaggatcacttgatatcagaagttcgagaccagcctggccaatatggcaaaaccccgtctctactaaaaatataaaaattagccagacatggtggtgggcacccctaatcccagttactcaggaggctgaggcagaagaatcccttgaacctgggaggtggaggttatagtcagctgagattgcgccactgcactccagcctgggcaacagagctagactctgtgcgcccccaaacctaaaaaaaaaaaaagaaagaaagaaagaaaaagaaagcatgcagattaaaacaggtacttaagagactttaagaagataaaatttcagctgggcacggtggctcacgcctgtatctcagcactttgggaggccgagacgggcggatcacctgaggtcaggagtttaagaccagcctggccaacacggtgaaaccccaactctaccaaaaatacaaaaattagctggcacctggcattctgatttttaagaagcaagcataataggattccattcttatgaaaaaatctgtatctatatgtgtataacaaaaatacctggaaatttaggatttagggtactctttttatttttggagaacagggctcactctcacccaggctggagtgcagtggcaggatcacggctcactgcagcctcaaactcctgggctcaaggaatcctctcaagtaactgagactacagatgtacactaccatgcccagctaatttttgaattttttcttttagagctggggtcttgctatattgcccaggctggccccaaactcctgggctcaagcaatcctcccacctcagcctcccaaagggctgggattacaggagtgaactaccacacccaatctatgatactcttaatttatattttactgaattttccaatttttgttactgcaatggataataatcacttctacagacagaaaaaacaataaagctttttgctgtgttgcaggcattcctttggccctgacattgtgtgagcacaaagggtaggtggggaatgacactggagctacagggagatggagcaggagaagaccaaggctcagcgtcctccggccttggcgtccagggctgattcaaggcctagaccccactgcggcttcccagagactcagacccacttctctttttttttttttaaacagagtttcgctcttgttgcccaggctggagtacaatggcgtgatctcggctcaccacaaccttcgcctcctgggttcaaatgattctcttgcctcagcctcccgagtagctgggactacaggcatgcaccaccacgcctggctaattttttgtatttttagtagagatggggtttctccatgttggtcaggctggtctcaaactcccaaactcaagtgatccacctgccttggcctcctaaagtgctgggactacaggcatgagccaccgtgcccggcctaagaccccttctctttcagggcagctggtgcagctgctgcacagccgacccccttgccccacactccaaagacactgggaatgtaatcctggcttgatgaaggtcaccctgtttctggccgtacaattcaccaaggaggagaagccctgggcaggaggcctggggctaggggcaggttctcatcctgcctactaccagcacaaaaacattatcgcagctcaatgaacactctctacgcatcaggcagtcctgctaggtgatgtacctgattcattttatttcctcctcctgatgacctgaagtgatgggtgggaccaccatcttcattgtacagatgagcaaactgaggctcagggaacctacatgagtggacccaggtgctcaaagtggaggtgcctgcagcagccactatctttgagactggacctggctggacccctcatgggtggacctcagtgaattctgccaggatcccaggaagggtgccttccctcatttcccagatgaggactctgagaatgagaggggaaggccacttgtccatgtcccacagtgactgtgtggcaggaagaggtgcaagccagagcctgtgctctcagctgccataccaggcagcctctttcacctgtgaggggccatgggcatgctccccacctccgtggctggcactagtaatatcaattaataataatagataatagcaataattattatgacatataattatatcaaatgtattatattaacatcatcatcatcatcatcatccacatcaacacagttgtgttgtaacctggggagtgtgtgtcagtggccagtgtgctgtcctgtatgccagcgcatttgctcttctcagcagatctataagtcttcattctgactttatttccccccattttaaaggcccagggagcagaccacatggggactacacctctggggcacagttgctactcctgtcctgtacagggcagcccagtgggaagctctctgaggctgtgcggtaagcacctttcccattgcagggaggttggggggcagctctccagaggatctgggtccatctcccagccgagccacccagccacaggatgtgcccttcccagcaggagaaaggacactgaatgacagagccaagggccaaggtgccaggaacagcaaccagggtttcaggggatctgtaactgcctcctcagccagtccaggcccgagcttactccatgccctttcactggtcaatcggttggccagctcatgccagggagctcacaccttcgagaggccacgctgctgccgaaaagaggggctgcttctccctgagtgcccatgacctgccaggcactgactgtgctaggccatcagcactgagcctcacaaaaccctttcaatggccctattttacagaggagacagtgaaggctcagggaggtcaagtgacttgtccaaagtcacatggacaggaagcctcatagtttcctggtggccagtttccaccaagaacgtgtgtgtattagtccattctcccactgttaaaaggacatacctcagactgggtaatttataaaggaaagaggtttaattgactcacagtactgcatgactgggaaggcctcagcaaacttacaatcatggcagaagaggaatcaagcatgtccttcttcacacggcggcaggagagagaagtgccaagcaaagcggggaaagccccttataaaaatcatcagatctcgtgagaatgaactcactatcatgagaaccgcatgggggtaactgcctccatgattcgattacctcccactgggtccctcccacgacatgtggggattatggaaactataattcaagatgatatttgtgtggggacacagccaaaccatatcaaggagggaaagaggaagggacaatcaaggtgttcagagggaggaaagagacccactgtgcgggaggcggcaagaaaggagggcctgcgtcaccagctctgactctctcaggacccgacttagtcatcggcccacctgttctccactcattcatacatttgtgggccttctccaggtgccaggctctttgccgggcattgagggctcagaggtgaaccaggctcatctctgttctcacaaagctcatgacagcagggcagaatggaaagggaaacagatgggcagacatcacttgacttggtctgtatttatgaaaggtctaagtaggccaggctcagtgttgggcactgaaggcaccaagtcagtgagaagctcaaggcccctgcctttctgaaggatgtgctccagtggtgtccagccctggccctccagaaacctttcttgcatgacccctgaaccctgaacacaaggcagaatttctctggaaagactgggagaagcagcaaatctaggggttctccatgaatcttccttgggcctggttctggggtgctgagcaggaatttgtctgggagagcaggggaccctgattagtgcctttcctggggactaaatcagggccctgagaggccagagctgtgcaaaggggtcatctggactactggacggtcagcaagggccacccattcaggatgcagccacagatccatggggttggagacccagcagaggctctcagtcaggatgggccacagctctaacaaaagggaggtgacttgcccaaagccccccactccacacctgtgctccccacagacagaagcatcagctcataggtagcactagctcactccatcctagcccccggggaggcccatgtcagcgtaaggcccatttcccagccccaggaaatggagaaacagagccacaaaaggacttgcccaagagcaccacccactggagacacaggcagaatcagaactgggagttgcccagcactttccaccacccgctcacgccccaggatggcagatccagcctggtacaggcgacgcaggatgatggcacccaatcttggggagcagcacgagccaggggcacaaagggaaactcttttcctaagcttcccctggtggtatgggggtttagtctttgttttgggggcttgttctaaatgctaaacctggctgactctgggcacactgcctataggttagccctgctctgcaaggagctatagagttaaaaataaataaacgggctgggcacagtggctcacacctgtaatcccagcactttgggaggtcaagggggcaggcagatcacctgaggtccagagttcaagaccagcttggccaacatggtgaaatcctgtctctattaaaaatacaaaattagctggacatggtggcaggcacctgtaatctcagctactctggaggctgaggcaggagaatcgattgaacccgagacggagttgcggtgagccaagatcacgccactgcactccagcctgagcaacaaagtgagactctgtctcaaaaaaattaacaaacaaatctctgttaaacctttgcaatcaccctgagatgttcaactgaggggtccttctcagtgtgaatggctgacaggaaatcccagaattgcccccatctcagcagtcaggaaggaacagctctgccaagcatggtggctcatgcctgtaaccctaacactttgggaagaggaggcaggagaatcacttgagcccaggagttcaaggccgcactgagctatgatcgcgccactgcactttagcttgggtgacaggcgagactctgtctctataaaaaaaaaaaaaaaacaagaaaggaacagctagatatatatatatagatagatagatataaatatagttttttttttttttgagacagagtctcactctgtcactcaggctggagtacagcggctcaatctcggctcactgcaacctctgcctcccaggttcaagtgattctcgtgcctcagcctcctgagtagatgggattataggcgcccaccaccatgcccggctaattttttgtatttgtagtagagacggggtttcaccatgttggccagggtggtcttaaactcctgaccttgtgatccacccacctcggcctcccgaagtgctgggattataggtgcgagcccccgcacccagctagatttatatttttacgtggaattttaaaaactactgaattcccttggtggaaatgagagtcaaaataagagaatgagaaaaaaaaaaaagaatggctaaataaattattaatagaatattttacagtcattaaataactttaaagaaaatgttaatgctgagaaaatattcaccatgtaatgttgggggaaagccagctacagagtatgattacaattaaaatgcacacatatatacatatatatatgatctatatggaaaaacaagcctggagagaaatgtaacaaaatagcaccatagttacctccggggagtgggatgacagatgattttcattttctcctttctaccttcttgtagtttccaaattttacaatgagtacaaattgcatttataattagacataaaccaaaaaagcatgagttgggctggggctggatggcagggtagaggcttcaccagcccaggttcatcccctccacagccaggatggagctgcttgggcgctgggctctgtcctcaccagctggcccagccaggccacaggaggcctaggacggcctgcaccacactgtccccggagggaccagccatgggacactgccctcaaggaatccaacccctgcccggggccctctggagggtcacttgtaggccataaatgtcctggctggggacactgggaaatgaaccactcagggctgagaatcagaacattcattatctgctgtacgagagaagccattttctttgttccttgtttttgtttgggatggctgagtgcagcaagtgggctagggagagctggcctttgtcaccctcccactgtggccccgcaggctctcagcctccccatgtgggagtggagcacccagctgctctggtctccctggactttctgatcccagcgctctgggtttcttctaacctgggaggtgagggccctgggtgctgatctgcgccttagggaagccaaccaagttcacttaaaagcagtgttggaaaggcactgacagtgagatccaggccggcctcctgccggggtctcctcatacccccacctctttctcagcacagggtgagaagccagtggtctccagcctggatccccacacaggtttccagagaaggggctccccgcttgccagagccagccgtagagttgggcaagtttaagaacactgccctcacgtccttccagccccagccctgccaccccaccttggggtcctggaagctcctgccctcctcctgggctattttagcaatcaggtcacccgttggcttgctgtgagcttgaggtcgatggaaacccacaggccttttctacagagctggtggtatctccccctcctctagatgcagccacaggcaggctcctcagcgtgagaagagaggaccaggcagtggcttggcagtcccccacagtgtggggcccctcctctctcaggaactgaggccacacgctgccacccacaccatcccagccagtggtcctgcagatgtggctgacagcagggaggagagccagtcacagggcgttgggtgcctgagcacccacacatccccacactgtgccccatgggtgctgcacacaaggccctcaatccagtctccacgagccccaggcagtgagtcgatcctcatttagagcagagctgagtgatcggccaaggtcaccgtgctagtgtgcagcagggctgagacagactccggagctgccccagcaaagcccaaatccattctggctgcactagtgtttacccaggaccccgcccttggtggccactgggtgtctggtccctgatccaagctgccaagtaagttcccctgatggagcttgggggagactttgtgccctggttctacccacacagcagggtcccaggttcctaggaccacgcaaggcccaaagcccctctctgatggcccgtgggttctgctcagaggattctgatcacctactcctgtttgggctaaatcctaagtagcagcagatggggccctctggctgaaggctgccccagtctccagctgcagaatgcgggacagttcccatccaccctcctccagacacctgacagggagcaggtggcctttttggccagccccaaccaggtgccagaccaagagcagagagcctgtgctcaggagcctccactccacccagggaagaaagacataaacacgcacaggaaagggcttttggagacagtgctggggagccccagtgaccaggccggaaacactgtaggaggtgggagggagataaggccctgcccaagactgggaagagcaaggcgcggtccaggaaccagacagaagctggtgtggctagaacagcgctgcccagtggaaaacaacgcaaaccacaagtgtgagccacacagggaatttgaatttttccaggagccacgacaaaaaggttttttaaggccaggtgcggtggctcatgcctgtaatcccagcactttgggaggccaaggagggtggatcacgaggtcaggagtttgagaccagcctggccaagatggtgaaatccagtctctacttaaaaaaaaattttttttttaattagccagaggctgaggcaggaaaatcgcttgaacccgagaggcagagcttgcagtgagcccagatcatgccactgcactccagcctgggtgacagagtgagactccttctcaaaacaaacaaacaaacaaaaccactttttttaaaagatgaagtgaaattagccgggtgtgctggcgcatgcctgtagtcccagctactcaggaggctgaggcaggaggatcacttaagcccaggaggcagaggttgtagtgagctgagatcataccactgcactccagcctgaataacagggtgagaccctgtctcaataaaaaataaataaataaagtaaaaaaaaaaaaaaaaaaaaaagataaagttggttgagtgtggtggctcatgtgtaatctcagcattttgggaggccgaggcaggaggatctcttgagctcaggagttcaagaccaccctgggcaatgtggcaaaaccccatctctacaaaaaatacaaaaattaaccaggcatagtgccacatgcctatagtctcatctactcaggaggctgaggtgggaggatcacttgagctcaggaggttgaggctgcagtgagccaagatcgtgccactgcactccggcttgggcaacaaagtgagactctgtctcaaaaaaaaaaaaaaagtccaggcgcagtggctcatacctgtaatcccagcactttgggaggctgaggcgggcagatcactaggtcaggagatcgagaccatcctggctaacatagtgaaatcccatctctactaaaaatacaaaaaattagccaggtgtggtggcatgtgcctgtagtcccagctactcaggaggctgaggcaggagaattgcttgaacccaggaggcggaggttgcagtgagccaagactgtaccactgcactccagcctgggtgacagagcaagactccatctcaaaaaaaaaaaaaaaagatgaaattaattttaatttatatatatatatatatatatatatatagttttgttttgttttttagagatggggtcttcctttgttgcccgaactcctggcctcaagcaatcctcccacctcggcctctcaaagtgctgggattacaggcatgagccaccacgtacaatttgatatattttatataatccaatgtaactaaaatattatcattttaatataatcaatacaaaaattaatgagatgatttacatccttttttttgacactctggctttgagatctggtgtgtattttatagactggccacatttcaagtgctcagcagccacagatggtcagtggccactggctggggctgcactggggcagagcacagtgagtaaaggggaggagatatgaggtaaggtcgaagcagtgggaaagggtcacctgggattttattccaagagcttcgaggtcgtgggagggctttaagcaggggcatcatgtgatctgactacttactgtctttgaagctgactctggctgctgcctggagggcttcggagcaggtgagattggctgcccagtgagatgcccaggtgggctgaaggtggcctagagctgcgttgatgacagccacagaagagcttcagggaatactgacaaggctgtgggcaggcagtgagacagggaggcaggcctggccgtctgcttttcctctccctctctttgaccaaaattccatccatgtaaccctgttcctatagctgccttccttccaggaagagatctgcgcagttgctacttaacaaagcctagaagaacccaaccagaataattttgccaagggctagaattgaaatatctgccaccttctgtagctcatagaatcactgtatttctgagcaagaaatcttttatttttttagacagagtcttgctctatcacccaggctggagtgcagtggggcaatctcggctcactgcaacctccacctcccaggttcaagcaattctcttgcctcaggctcttgagtagccgggactacaggcgcgtgccaccacacccagctaattttttctatttttagtagagacaggtttcaccatgttagccaggatggtctcgatctcctgacctcgtgatctgcctgccttggcctccaaaagtgctgggattataggcatgagccacggcgccaggcctagaaatcttctagccactcagtatcatacagtgattaggtggtctctggggctagcccgcctggagtgaatccctgctgcccctctaactagctgtgtgaccttgcacaaaatacttaattcttctggacttccatgtcttcatccggacaccagagcattaatcatctgtatctcttgggatgactgggaggggtaaatgggtctgtaagagtggttacaccaagggcactcctgttatctattattgttgatgttgccactgttattaacctacaagaacattgagccccagggataggaagggacctatccaatgttacacagcaaacctgaagcacagcaggaagcagaatctaaatttttaacttctgaggtggggcacggtggctcacatctgtaatctcagcattttgggaggccgaggcgggtggatcatttgaggtcaggagtttgagacctgcctggccaacatggtgaaaccccatctctactaaaaatacaaaaattagctgggcgtggtggcgggtgcctgcagtcccagctactcgggagggtgaggcaggagaatcgcttgaacccgggaggtggaggttgcagtgagccgagattgagccactgcactccagcctaggtgacagagtgagactctgtctcaaaaaaaaataaataaaaaaataaaaataaattaaaaaaatagctgggtgtggtggtgcatgcctgtaatgcctgtaatcccagctactagggaggctgaggtaggagaattgcttgaactcgggaggttgcagtgagccaagatcgccccactgtagtccagcctgggtgacagagtaaggctccgtctctaaataaataaataaatgaataaatgtttaattctggctcttactcagagctgcctctcaactgaatttgctggttgtcccttcatccagacattgaccatgttcttgccatgtgctggtgccacgtccacagcttgggggagacactaagatggtacaagactcatctctacaaaatcgaagttttccagttcagaaggaaaagctctttctcaaacactcttggccacagcgggaggaagccttagtgcatgcagagagtcgtgtgctggtaacggggcaattaaaacagtactggttgaagaaccaggagatcctggggtgccccagcctctgcccaacttgctctgtgatgcaggcaaggggcttggcctctctgggactcagtgcccttgtgtgtgctgaacttgtgttaactgggggcggactctaggcccagaccctgactccaaagtatgcacagccgattcccaggcaggctgggaggtgtagctagaactataggcatatgcctccgaggacacagatcctatggcccgaattttcctggaacacttctggctgacctgctcccttcgtaagagccatgtgtgtacttgatcacacatcctgggttttaaaatataatttgtcactataataaagtcatgagagtctagttcatccatttcacagaccagtaacatttccaaagaaactctggggaacctgcaaaggactgaaagttgttattctgccaaggaaggcccttagaaccaaacgacaaatggtgctggaaaaactggatatccacatgcgaaagaatgaaactggaccctttccttacacaacacaaaaatcaactcaaaatggatcgaagacttaagacctgaaactataaaacttacagaagaaaatataggggaaaagtttcatagcactggccttagtaataatttcttgaatatggcaccaaaagcacaggcaagaaaagcaaaaatagacaagagggactacatcaacctaaaaagcttctgcccagcaaaggaaacaagagtgaaaggcaatctactgaatgggagaaaatatttgcaaaccatatatgtaataagaagttaatatccggccgggcacagttgcttacgcctgtaatcccagcattttgggaggctgaggagggtggattcacgaggtcaggagatcgagaccagcctggccaatgtgctgaaacctcgtctctactaaaaaatacaaaacttagctgggcatggtggcgtgtgcctgtaatcccataatcccagctactcaggaggctgaggcaggagaatcgcttgaacccgggagtcggaggttgcaatgagccgagattgagccactgcactccagcctgggtaacaacagtgaaactgcgtttcaaaaaataaataggccgggctcggtggctcacgcctgtaatcccagcactttgggagcctgaggcgggcggatcacctgaggttgggagttcaagaccagcttggccaacatggtgaaaccttgtctctactaaataatacaaaaattagccaggtgtggtggcaggcacctgtaatctcagctacctgggaggctgaggcagggagaattgcttgaacctgggaggtggaggttgcagtgagccgagatcacgccactgcactccagcctgggtgacagagaaagactccgtctcaaaaaaaataaaaataaataaaaaataaacaaataaataaaaataggccacgcacagtggttcacacctgtaatcccagcactttgggaagccgaggtgggcggatcacgaggtcaggagtttaagaccagcctggtcaacatagtgaaaccctctctctactaaaaatatgaaaattagctgagtgtagtggtgggcacctgtaatcccagctactcaggaggctgaggcaggagaatcatttgaacccaggaggcagaggttgcagtgagccaagatctcaccattgcattccagcctgggcgagactccgtctcaaaaaataaaaataaaataaaaataaaaataaaaaataggcaaaggacttgaataggcatccctccaaagatgacatgcaagtggtcaacaagaacatgaaaaagtgctcaacctcactgatcaccagagaaatgcaaatcaaaaccacaatgagccatcaacttacacctgttagaactgccattatttaaaaaaaaaaaaaaaacaacagtgttggcaaggatgtggagaagttgaacccttgtgcatggttagtgggaatgttaaatggtgcagctgctacagaaaacagtatggaggtttctcaaaaaattaaaaatagaactaccatatgatccaggaatcccacttgcaggtatttttccaaaagaattgaaatcaggatctccaagagatatgtgaactcccatattgattgcatcattattcacaatagccaagaggtagaaacaacctaaatgtccatccacagatgaatggataaacaacatatggtgtgtacacacattggaatattatttagccatcaaaataaagaaagcctgtcatgtgctgccatatggatgaactttgatgactttatgctaaatgaaacaaaccagtcacagaaggacaaataatgcatgattccatttatatgaggaatccaaagaagaaacagaaagtagaagaaagaaaaaaaataaagacaaaaaaattttaagtagaaaaaagaaagggaaaaaatagtagaatgggccaggcacagtggctcacgcctataatcccagcactttgggaggccgaggtgggcaaatcacctcaggtcagtttgagaccagcccgaccaacatggagaaaccctgtctctactaaaaatacaaaattagccgggcgtggtggcgcacacctataatcccagctactcgggaggctgaggcaggagaattgcttgaacccaggagttggaggttaaggtgagccgagatcgtgccattgcactccagcctgggcaacaagagtgaaactctgtctccaaaaaaaaaaaaaaaaaaaaaaaatagtagaatgggggttgggttgccaggggctgagggggagtggggaacagagagttgctgttcaatgggtatagagtttcagtcacacagataaaaatgtccggaggtcttctgcacaacattgtggttatagttaacaatactgtagcgtgcacttaaaaatttaagaggagccggggcagtggctcacgcctgtaatcccagcactccgggaggccaaggcaggcggatcacaaggtcaggagttcgagaccagcctgaccaacacagtgaaaccccatctctactaataatacaaaaaattagctgggcatggtggtgggcgcccagtagctattacagtagctagctgtaatcctagctacttgggaggctgaggcaggagaatcgcttgaacccaggagatggaggttgcagtgagccgagatcccaccactgcacaccagcccaggtgacaatgcaagactctgtctcaaaaaaataaaataaaataaaataaatacacacacataaaatatattacatatatattatacatacatacatacatacatatgtattagctgggtgtggtggcgcatgcctgtagtcctagctactcaagaggctgaggcaggaggactgcttgagcctagaaggtcaaggttacaatgagctatgattgcatcattacacttcagtctgggtgacagagcaagacaatatctccaaaaaaaaaaaaatacttcttcaatttaaatagctttagttttgtgggaaaaaccaagaaccacagtgtgcctgtctctatttcttgctcttgttcccttttattccctcctgaatttctcaccacaccaggcctttttgttctgggactcttcctcctctaccctccccactccctcccctgcctcccccaagctcacagcatttcacacagttccagaaaagtgcttctctccctgactgccacctggccctgctgtcttcccacagggctgtgggctccggcagcagagaccttttcctactccctgtgcccctgcatctaaacagacccagcataggagaggggcctggtgaagatggctggtaggaaggcactagactcgggctttgagagccagaaggcctcagggagtgaagaatatgggactggcaggatctaggggctgaaatgagtggccataaaagaagccccctcaagacccaagactccttggtagtaagggctgggcatctctctgtgtcccacctcacaccctggggcgggtgaggagaggaagtggaggggttgcagggttgggggaacaagcgacaagcccgccctcctgaggagccccagggctggtacaaacggcaggaagaggctgagctgggcccctggagccacagaggcaggagggagtgaagaggccctgtggctgccatgggggacagtccagcagcctcctcctgctcccctcaagactggccggaggtgtctcagcccccgtagccaaccacagagagagcacagggcggaagtggctggcgcctcagccatagctgccggagatgggctcaacggccacacggtccccacattcggggagcctcaccgcagccccgtgggcacagagacccaggtggagctccaagggacacatgaggcacagggagtctagggcagcagcttcaaaaccacacactggtctttctgctggcttttttggtcaccatcccctgcttaaaaccccagggtcaccccacactttcagcacagacaggctgcattccacccacctgcaggctcctctgcccggcattcatctgtgccacctgccccggccatttggctccgactgcaatgacacgtttgtctgggagattcttcaagggcacataaaacatatctgcctttgctcactgtgatgtctccgacgcaaagcagagagcccgccagcgtagccactcagagctgagtggtggtggaatgagtgaaaaggctgcagctggaagggctgggaggcggggggcagagtgggggcagccaagggttttggggatcacacaggcttgggaagaaaagtcagctcagacccactggctatgtgacctggccctgcaggtccaactgtcaatgggtctaaccccgcccacctcaatgatctgtgagagctgagcgggggagacactgttcagaaaagactgggtccctgaaactgttgttgtcgtttaatccagccattttttttaagtttgtttaagagacaggggtctccctatatttcccaggctagtcttgaactcctgagctcaagcaatcctcccaccctggcctcccaaagtgctgggattacaggcgtgagccaccgtgagcttggccccagctctttcatttatggacaggacatttcaggagagggatccatccagtctcatcttggtgtttaatatttaaatgcaccaaaaatggggtgccaattggtgccaactttttggaaagagactttgatgtaatctgcctaaaagtaaaatgctcatgttcagcaactcagcccttcagcttctaggaattttgttctgcagggaaaaaaaaatgctgtatttgtattattaatattgttactgggtggcagggggaggaaagtattcagtgttttcagaaccacccaccaggaggcgcttttgcatcaggggcccaatcaggttagcccagagcacctggatttaagtagcaaaaacaaatgacaatctctagcccaatgtctcaagaacattccagtcttttacttcatctcaccctcgaaacttcctttttttttttttagacagagtctcactctgtcaccacggctggagtgcagtggtgcaatcacagctcactgcagcgtcgacctcccagactcaagcaatcctcccacctcagcttcctaggtagctgggactaggtgcacatcaccatgcctagctaatttttgtattattatttttttttttgtagagatagggatcttgccattttgcctaggctggtcttgaactcctgggctcaagcaatcctcctgcctcgggcctcccagttctgggattacaggagtgagccactgcgcctggccatgaccaaaacttttattagagacagtatctacttgcttggtgccctctctgcccttcctcctaaagaatcccccttcaaaaggaaaaaaaggccattcaaatttgagagagactcaggggtccagagtaaactaagttaaatgaaatcaaacctggaccgtgggcttcaagtgtgttattaaccccctccctcctgtcctgctgcatccttggctctgccctttcacttacgtccacgtctctaaacccagccgttcttccttctcccttgggtctctgtgtcttctgtctgcctcaggtgtccttccacacgctacccacccgcctagggaatactccttctgagttcctgggcaaaccacccagttctcctcctgaaccctcccccaaaaggctccctgcacgttccatctcatgagggccaggctgtgcccaggtgaggacactcatcacctccacttttcccatcacactggtgtgtggagcgcccaccccacctgggatgtagagggatgctccttgcccagcagtgcttctccctgggcctcagtttcccagtctagggtacccccacacctctctcagcttgggcgtgctgtactttaccccatgtcagcagttctcattaagctagtctttaaaggaggaaaaaataattttaaaaaatcttcctttgttctggcctccggtctatttacaatgacagttcatgaggaactgggttctgagcgaaaacaaacaaaatgcctccattttagaaggggtaaggtctggaggggaaagagggagataggaaagaacctgtggtggcctatcctctccccgtgacaggaaggcctttgaacaacacaattctgattgtgctgttgctacctcatttcaaatccttccccctgccccaccctccagaagcagcacctggcatggtaggcaaagccccatcagctctggcctgcacgactggcgctccagctttggctgtcctcccgcagccctgggatccctaagcctagaatacgccacgcccattcccccaccttccccaccagccgaattccccttccgctggggagactcaggttgggggtcaatcttcaagaagcctccctgtccaacccactgaggcaggtggcctcagggtcagggctccaggtttcccccacgcccaccccactaacacacacacacacacacacacacacacacacacacagccacctgggaattccagggagcacagctgcgagggcagcaaggaccacaacaatgctgaccacaatagtggctccaggaaggcctgttcttgttccgggcgggaggcctaaggcagtgatgctccctggcagcctctggaagcccaggggaagccagtttctatgtgggattccctgactctggcccatgggcttaggaacacattgtgtccctccactcccagggcactgagtcccagctgtggggtcatctgagtcccacagcacacctgctcatttgttcattcattagtttattcattcattcaacaaatatttattcagtgccaggctttgggccaagaagagaaagccactaaaaagagcaacagataaatacacggttgcacgtgatgtcaagtgtcataaggcatgatggggtgtgagaggatgcagagccaggtggccagggaaggcctcctagagatgatgcttgagctgagatgtgacaaatgaggaggtgttagcctgggaggccactggaggccggagcagcagagggagtgcaggcatggagcggctggccagacacgaggcaagaggagaaacagaggctggatcatgcaggactgtatgataggtggggaaaccgaggcatggaaactggtgacttgcacatggccctgcaactagttagatgctcgcttcctaagtgccacccaccccaggaaccaggccttcccatctgagcatgggatgcctgcactgctcttcttcgcagtggaacaaaggaacccgttttttttgttggttttgagacgaagtttcgctcttgtcgcccagactggagtgcaatggcataatcttggctgactgcaacttccgcctcctgggttcaagcgattttcctacctcagcctcctgagtagctgggatttacaggtgcccaccaccatgcccagctaattttttgtatttttagtagagacggggtttcaccatgttggccaggctggtctcgaactcctgacctcaagtgatccacctgcctcggcctcccaaagtgcttggattagaggcataagccaccgcgcccggcctcaaatggttcttaatcacctagtgtctgtcatgtgtccacccggggttacccagggcagagacggcatcatctccatctcagaggcccagggccgggtgtattgtaggtgtttaataaacacttgcttaattggatcttggtatctccaggatgtaggccccgatgctgcccttgaccacatggctccctgagtgttaactgaaccagcagagttggtcttgcagcacgtgcatctcattcaggcccactgcattttctggccctcactgctaagagtccgtgcagaaatgtgagttctcagcagtgctgagagcactgtgtgcccccaaagagctctgactctcagctccccacattggtttcacctctaatttgtacccctctagctcaaaccttaatggcgaaagcttgacatcgcctttggcaattcagaggctattacttgtcagcactatctaccttgtcagtgcctgggagaagcaaaccccacctcataagcatgtatcaagcaatcacttatcaagcacctcctaggttcgggatcttttagaaagccccacttggggaggtgcgatggggaatggctctgggcctccccataggccagtttatcagctctcacagaggagcacaaaccactggctcaggacgtgcaggtgcgaaggaaagaggaagggcgtggttggcagcccctctttccctgggcagtctgagtcacattccacctctcccagtgttacagggtttgtgaaatgaccacagctcctcactcttctgaggagaaaccagaggtagaggagaaagcacagagtagtgcagagggaggagccctgcctcccctccacacccttctaagactgttaacatgtccttccagcaatgtcagccagtgtcagctgtggggtgcatcagaattctggaagcccagaagtccaggaatttgccatccagacggtgagacatatgcatagagaagtgcagcacaggctgggtgcagtggctcacacctgtaatcccagcactttgggaggccgaggtgggaggatcacttgagcccaggagttcaaggccagcctgagcaacagtctcaatagtgactgtctctatttaaaaaaaaagaaaaaagaaagaaagaaagaaagagagaagtggctgggcgcggtggctcatgcctgtaatcccagcactttgggaggctgaggcaggcagattacctgaggtcaggagttcaagaccaacctggccaacacagtgaaaccccatctctactaaaaatacaaaaattagcagggcgtggtggcacgtgcctgtaatcccagctactcaggaggctgaggcatgagaattgcttgaacctgggaggcagaggttgcggtgagccgagatggcgccattgtactccagcctgggcaaaaagagtgaaactcggtctcaaaaacaataaatagaagtggccgggcatggtggctcatgcctataatcccagcactttgagaggccaaggtgggcggatcccctgaggtcaggggttcgagaccagcctggccaacatggtgaaaccctgtctctactaaaaatacaaaaattagccaggcatggtagtgggtgcctgtaatcccagctactcaggaggctgaggcaggagagtcacttgaactcaggaggcggaggttgcagtgagccaagatcgcaccactgcactacagcctgggggatagagcaagactctgtgtacaaaaaaaaaaaaaagaagtgcagtgcaggcaactggtgctcagatgggaaggcctgtcagggcactgtgtcggggacagagatggttgccgccatcctgggacagtgtccaacatagtgcaagagatgggctgggtgaggcataatgccagcgatgacagcaaccacccccagtggtgctggctgtcgttgactgtggttcactgtgagtgccaaacacacatgctttgctgcatttactcctccagccccggagttgccactgctcccatttcagagatggggaaaccgtggcagggagacttgcccatgggcccccaggcagtaagagtagggctggagggaagaaactggcaggctggttccagagacctccctcttaggtatcactgagaggggcttccaggcacctctgtgtggttgaacttgctgatctgttcaaactgctgtcatataaggacgttcaacttgattttcagcatcaccagcaaccttgctgctccttccccctctgggctagtagggtgagagctcttctcagagacaaagaccaggatgcaggagcaggcatggcttggcctgcagacaagactggtaggaggaggagacctggacccagttgctctaaatctagcaaaaagattttctaggccctccagaggctacctcctccccttagctcccactgcctgcagccgcctgcaaattgcttagaagtgttgataattacagcaggcccaatcccatcaacacctgagggagaggaaactggagggtcctccttctgtaagcttatcccagagcccactgacatccatcatctcccctgatcccctaggatggaggcaggaggtgggacatggtccctgttctcttgagcaggctagtgacttgcccaaggtcatgcagacccttccagggaatactgggattagggctcagcttttcctgctcagctcagcacccaccgataaccagtagcgcttttccttttctgagctgagcaagcctcagagggcgagtgaaagaggagccaccggaaggtgctctggcaggtcagattgcccacgcatgccagtgtccagccccctgcagaactctgggccttggtgaggtcatttcagaaggaaagaacgttggcactaacagggatctcaaaagcacccagtgtaggccaggtgcgttggctcatgcctgtaatcccagcactttgggagacggaggtcaggagttcaagatcagcctggccaacatgttgaaaccttgtctctactaaaaataaaaaaatcagccttagccaggcatggtggcatgcgcctgcaatcccagctattccagaggctgaggcaggagaattgcttgaaaatgggaggcagaggttacagtgagtcaagatggtgccactgcactccagcctgggtggcagagtgggactctgtctcaaaaacaaaaaccaaaagaagcacccaatgtaagcctttcgtgttatagatggggtcatagaggaacagaggatgaacagagtctgcccaagactgttagcaggttagacccaagcccctgactccccatcccccacttctcttctggtgcctgacaagagagtagtttcctacacattcaccttcttcataggctttgcctccaggagccagggaagtgtacagaatggctttggggctgggcagacttggtttggagccacatccccctacttggttgctgtgtaactttgggcaaatgaatttccctctctgggcctgtttcctaatctgtaaaatggggaaaataataactgcttcttaatgtaagaattcaatgaactaaggtgtccacaggatggagagctctgcaaaggccccaggcaggcaagggactgaagacaggcattcctgaaggctaaaaggtgatcaggcattccacaaatcccccttcctctttccctctctgatgccaaatacacccaagctcagagacacatcttctgcctgggctttgagacaggcctgaaaaccctcccacactgtctacaagcacagaagagcttctctctggaatgattgctctgacctggaggagatgacagagccagcactaggaatctctggggagagcgctccaggagctggtgcatgggtggaaaggtggaattcctccccactgctgccacccccaacactgcccaccccaggagcctcctggcttccaggggtggctgcagagacctgctaggtggaggggttttctcagggagccttcacttgctcccacagacacatctgctgaaagcagtgcaggcaggcatgaggcaggcagtggagctgcaactggctgacagcaggctggagaggggagagggagaaagggagcgaaaagggggaggggagactgggtgagtcgtactcccttccccacggcccaccccgacaagctaagaaaagctctggggggagaaaagctgctaagatgcacagttgccctcccctctgtgggaggcccttccttccccagagccagctgccccaggcagattagcattgggctccggaaaagcaggcccacaccagcccatgggaggccgccggctgagtcagctcctctacctggcaggaaatcattcataaaaatgacacctgcccagagcccagcgcccagcctcaccagccagagtctccagccacacagccacactgcctcctgccgcctccctcccacctcctcccagccactgtacagggcagacctctttctctttctctttctcctgggaagaagaataatgagactgatgtgaaataaggccagctcggccttcgtcaatcagtatttacgggtcgcctgccctggggacaatagtagagtcaagaagagcaaccacttcactcaatgatgaacaaacatctgcgacacagcttccagaggttctcactgtcccagccacgtgcgtggcggacactctttacgttcagtttctgtgtggatgaccagaggctccttagacacacagctagacacagataactgggccaatcctcccacaaagggggtccgtagagcagtggtgacttacacaggtcacacgtgaggtcaaactttaagtccatgtcaggccggtcgcggtggctcatgcctgtaatcccagcactttgggaggccgaggcaggcggatcatgaggtcaggagatcgagaccaccctggctaacatggtgaaaccctgtctctactaaaaatacaaaaaattagccaggcgtgatggcacgcgcctgtaaccccagctactcgggaggctgaggcaggagaatcgcttggacccgggaggcagaggttgcagtgagcctgagattgtgccactgcactccagcctgggtgacagaatgagactctgtctcaaaacaaaaacaaaaaacaaaaaaaaactttaagtccatgtccctaaaatgtagacaacattccatcttgttctttctttttttcagagacagggtcttgctctgtcacccaggctggagtgcagcggtgccatcacagctcactgcagcctcaatctcctgggctcaagtgatcctcccgcctcagcctcccgagtagctggggttacaggaatgagtcaccacacctggcccatattgtcattcttacttcccttcgttcaaaccctgatgcactctcttatctgggagataaaatgcaggctgctctcctgctgaagatgttacatcctaatcacagccctgcatgtctgggcctgcgatctcggccctcatatcgctcccccttgatctccttcaccagccgccctggccttgtcgtttctcaaactcacaaaacatgctgtcacctcagggcctttgcacgtgccttcccttctgtcttccatcattacatgtcaggctcctctgcatcctgcaggactaggtcacctgtcagcttctcagagaccttccctgaccactttaagaatctgcctccccctggccgggtgcggtggctcatgcctgtaatcccagtactttgggaggccaaggtgggtggatcacaaggtcaggagttcgaggccagcctggccaattgggtgaaaccccgtctcaaaattagccaggcgtggtggcacgcacctgtagtccccactactcaggaggctgaggcaggagagtcacttgaacctgggagacacaggttgccatgagctgagatcgcaccactgcattccagcctaggccacagagtgagacttcatctcaaaaaaaaaaagaatccgcctcccacaacacacacacacacacacacacacacacacacacacacacacacacattattccctatccctgcatgaagacagctcccatcctaactcacagaacaagttcattatggacttctttacccagctactgtctgtctccccaggcagagtcaacccacaaggttgattttgctcaccctggtgttcccaaggcctggtacaaagtagatcctcagaaaatatttgttaaatgaataattaaatgacttctcactgtaagcaattggcaccacttaggctagcactcaagcaccttctatcctcttgaccataccacaaagttaaccagttacacgatcagaacacctcttcttcatttgttccttcttatgatgttcagtagagagaggctcagaagagcactgcagggtgaggctggagctaggagtttggaacacaggtgcagggctgttccacccaccacacaggtgaactcccagagggcaggggcctgttgatggtggatgggaacattcagtaaaacattccataaactgttgccttttttttttttctgagacagagtcttactctgtcgcccaagctggagtgccgtggcgtgatctcagctcactacaccctctgcctcccaggttccagtgattctcctgcctcagcctcccaagctcccaagtagctgggattacaggcacacaccaccacgcctggctaatttttgtatttttagtagagatggtgttttgccaagttggccaggctggtctcaaactcctgacctcaagtgatctgcccgctcggcctcccaaagtgctgggattagaggcgtgagccaccgcgcccggccttgccatcatttttgttctcctctgtgaagaggacagccaagagtgtcagaggtcctcaaacacttgctgcttcataaggagggtctcccccttcttaccaatctctaatcagcatttacaaagcagccaccaggacccagacctccattagaagcccaggcaaatataaccaaagtgtatgatctagggttctcaacacgtacgtgcacatcagagtcacccagggagcctgttaaaagcacagatgggcacagtggctcacgcctgtaatcccagcacgttgggaggccaaggtgggcggatcacgaggtcaggagatcgagaccatcctggctaacagggtgaaaccccatctctactaaaaatacaaaaacttagccaggcgtggtggcacacgcctgtagtcccagctactcaggaggctaaggcaggagaatcacttgaacccaggaggcagaggttgcagtgagttgagattgcgccactgcactccagcctgggcgacagagcaaggccccatctcaaaaaaaaaaaaaaaaaaaaaaccacagatgtcctaatcactacccattccatcctattttgatttcacaggtccaggctggggcaaggagagctcccaggggattgtgatgtgcaccaaacactgagaacccctggccatgcaggggaactccctgaggagcttctgcaaacaaggatgccaggcccctctgctatcagagatcctcatcttaaagagcctgggctggagacctaacagtgaaatttttcaagcattcctcaaatgctgttgtgcagccagggtggggggtgggggggatcacttgaggtcgggagttcaagaccagcctggtcaacatgctgagaccctgtctctactaaaaatacaaaaattagccgggtgtggtggcaagcacccatagtcccagctactcaggaggctgaggcaggaggattgcttgaacccaggaagtggaggttgcaacgagccgagatcgtaccactgcactccagcctgggcaagaaaatgagatgcagtctcaaaagaaaaaaacaaacaaaggaaaacgattcctgcattttatcatcaggaaactgatgcaggaaaaaaaaaaaaaggtcttgccgggtgcggtggctcacgcctgtaatcccagcactttgggaggccggggcgggcagatcacctgaggtcaggagttcgagatcagcctgggcaacacagtgaaaccccgtctctactaaaaatacaaaattagctgggcatggtgacacatgcctgtaatcccagctactcgggaggctgaggcaggagaattgcttgaacctgggaggcggaggatgcagtgagccgagatcacgccattgcactccagcctgggcaacaagagtaaatctccgtctcaccaaaaaaaaaaaaaagagagagagagaaagaaaggtcttgccagtaccttctgtccaggccttgcaaacccagagtggccccaagtcagtggggtctccttcaggccccacaaggcgagctggagagctgctggaaatcagctgatgtgctggcagagctccagcccagagtttctcatgacttggagccgacatattcccagcatctcagctcatttcaggcaaaatcatcgagcatattttaggatcagcaaaaacccacaatgcctttggccgagcactttccctcttcttgttgaagcccaggggtattttctaggaaattgagtccatctgtttctgattcattcgtacttaactcatcaccgggctgttttgtaagagccctttgatgtgaaagccgccttattccataagcctctctaagcctttatttagtcaacagcaggtaaacgggcctctccaaagaggccagaggcagcatattgatctcctgctacacaaagtccatgtgaagggaaagtgtggcccaaacgcctgcctggagacactgagactccccgtctttgggcctagcagggcaaagcagaccactccctagccctgacccagcgctgtggggctcagccacgcagagggacctcctctggcgactcactaactctcctccccaggcactgtaacccagcgtcctcctccataactcacagccttgctacatagatttacgatttcctgtatgttgcctaagagttccttttttttggtgggggacagggtcttgttctgtcacccaggttggagtgcagtggtgtgatcatgactcactgcagccttgacctcccaggctcaagcaatcctcccttcagcctcccacatagctgggaccacaggtgtgtgccgccacacctggctaatttttgtattttttgttgagacagggtctcactatgttgcccggactggtcttgaactcctgggctcaagtgatctgcccaattcagtctcccaaagtactggggttataggtgtgagccaccgtgcccagccccaagtggtttttttttgttttgttttttgagatggggttcaagcgatcctcctgcctcagcctcccaaatagctggacctacaggtgcctgccaccacgcccagctaatttttgtattattagtagagacagggtttcattgtgttggtcaggctggtctcgaactcctgacctcaggtgatccacccgccttgacctcccaaagtgcgggggttacaggtgtgagccacggtgcccagccaatagaattttttttttaaagagaaccattggtctagccattcatttagtcttgggtagaacttgcagggggatcgggtagctacctaccaccaataaatttgcttggtttatcattttctccaaaagtactcagtactatggcttaggcttagtactaagcacccaatgatgagtgatagaggtgatgatgtacaactctgaagcaggcactgcattcagtcctcagaatcaccttcagaggatacactatctccattttatagatgaacctcaaaggtatggacaggtgacacaagcctccaggttacgcactgcttagcaccagggctggtacacagtgggcggctaacatattctcactgaactggtgcatccatgaatataaacaataataggtggatttaggtcgagcatggtggctcacgcctgtcatcccaacacttcgggaggctgaggcgggaggatcacttgaacccgagtttgagaccagccgggacaacagagtgagacttcatcattgcaaaaaatttaaaaattagccagtcatggtggtgtgcacctgtagtcctagctactctggtggctgaggtgggaggagctcttgagcccaggagttcgaggctgcagtgagttatgattgtgccactgcactccagcctcagtgacagagtgagaccctatctttagaaaattaattaattaatttaaaaaaaggaggtggtgggctgggcgcggtggctcatgcctgtaatcccagcactttgggaggccaaggtgggcagatcacctgaggtcaggaattcgagaccagcctggctaacatagtgaaaccctgtctctactaaaaatacaaaaaagttagccgggcgtggtggcatgtgactatagtgccagctactcaggaggctgaggcacgagaattgctcaaacccagatggccaaggttgcagtgagccaaaatcacgccactgaactccagcatgggaaacagaatgaggctctgtctcaaaaagaagaagaaaaaagagatggatttaagtctcaggccaggcacggtggctcacgcctgtaatcccaacactttgggaggccgaggcaggtggatcacctgagatcaggagttccagaccagcctggtcaacatggtgaaaccccgtccctactaaaaatacaaaaattagctgggcatggtggcatgcccctgtaatcccagctacttgggaggctgaggcaggagaatcgtttgaacctggaaggcggagggtgcaatgagtagagatcgtgccactacactccagcctgggcaacaagagtgaaactccatctcaaaataaataaataaataaataaataaataaataaataaataaataaataaataaaaataaacccaagtctcattcaaagtcaaacacattctaccacattagcaagaagtgttacatgaggtaatgcacactgtgggagagaaaggactccctcccttcttcctgccttccctccctccctctcatttgagtttatgaaagcagtgatgcgaccaaagcttttctgaatctaacctaccctcaagacatgcagggcctaacttagggagcagcgatgaacagagatggtaaggaactggtttcacaggggccatgacatgggggaccacctgctagaggaactgcaaatgactcaggccacgggctcagatcagcccagggaatcaccgcagtctggacagcaacaaggcatctagaaataattgaggtggtcagtggggaggaagttcagttgttttggctggaaaaaaggttgtttttttagaaggaggctatctctgtcacctacgttggagtgcagtggcctgatctcagctcactgcaacctccacctcctgggttcaagcaattctcctacctcagcctcccaaatagctgggagtacaggtgcgcgacactatgcctggctaattttttatttttagtagagatggggtttcaccatgtttcccaggctggtcttgaactcctgaactgaagcaatctgcccgccttggcctcccaaagtgctgggattacaggcgggagccaccactccctgcttgaaaaaaatgtttttttatttttattttttttatttttatttttttgaggggattgcacagtttatttccaaacactcagaggataggaggtggcctatgggctccatctgcctcccctccctgcatttggctgaatcaagaacttctccccccgacccccaagaccctaggctgtgcccaatagagaaggcactctcaccccccaccctgaggagacctagacaggtgaggagcatggagggtgggggaacagagttcaagtattcacagttcccccatctacacccctggattacactgtgccagagccatgagggaggatcccacctctgggattcctagtggtgttgatagtccttctcccacttagaaccctccagatgaactccctactccttttccctgaaataacaaaccaagtcctaagccctgtagtctgggcaaggaggggccttagcaggccactcacccaaggcccccagggatgggggtgagagccttcacctgtagtgaatgggttgggagcaagtgtctataaggagagaggaagggagagaactgagaggaccctgggaggcaggcttggaggcttctgacacatgagttcagacagctctggtctgcgactccaccccaccccacaccccaagcccagaatccctgagagtccaactgcaaaggcagtatggccggagggaggaatgggagcaggggtagagttgagcaggaccttggcccccctctcctagtaggtcctgctcctgggacacatgcttagggacggccaggaccaggctcaggtcctagtcccatctcttagggtgctgatcttccagaatagctgaatcctggggaacatagacacaccaatccccacaccccagacgtcctggcctcaggtagaatggtgggaatgggctctcacaagggtattataaaaagctaaaaccattaaacactttctggggagaagtggctcccagtctcttgcctccccaagttatcagtctccccagcgcctagcagacagggctaaggaggtcccagagagctgagggaggagacggccacagcccctgggcccagagagagggcccactagcaccatggaatgttgaggtgcctctgcagcctgactggcccccacacaggggccctccgaagctggagtgcacacttgctaaagcttctgtactcttgagaggggacccctgcaagggagcagagaaggcaaagacttcgcttaagtccaggcaggggtctgaactgggaccccaaagggcacccttgggagtcatgatttgaagaatcttcgtaccacaaactggcccaacagaaccacacccagaaccaccagcacgttcaggatgggaccattgcccaagttcagggctgccacccagccacccctctgtgcaatccaccgggcaatgcagtgatgcagcatgaagtccaccacaaagcgggtcacctggcccaggaagccagtcaggccacgctggtagatgtgtagggccagacggtagctgaagcccagaagagccaccacacggccccaattgatgccactctcaaacaggctggaggcaatcttggtgaagtactcataggcattctctgccgtgggctgcaggtgctgcaacatggtctggaactctgagtcatagcgtcggttgatgtcgtccccaatgatggcgagctgccgtcccacctgccccatggtgctgctaggttgcagaggtaaggtgaccatctctgggtcggcaggggcagccgccccttcagcctcctgttcctgctgatggtggtaaaaaacgtagctgcggaaaacctcctctgtgtcctgggctacctgctcctcagaagcagagggcagggcaggctctccgcactcctgcctgggaggacctgggccttgccccgaggccatttttcaggtctcagtggaggacgggatcagcctgccgggatcctggcccaacccgggtggctcagcagggtggagatggaggtcccgaggggctggcggctgctgctcccaggggctgagtgggagcccagtttccaggaatgggcgtcagtgcattcccagcatctggatgtagcctttacttgtccctgtgcagcctgagggacccgcgagactccagtgatcatagaggtgccagccaaaaatgtttttttaaatgatgttctcagtatctacgttcttagcaactaagatgatggatcttagttatagaactcataactaataaaatcctctaggactacagttcatacaccaaaaaatagaagctataataatcttgtataaaggaaagaatctaaaatagaaactatggacagtggctacctctggggaataggttgtttttacttttcatctttttcagttctataacatttgaatttttattaagtatatttcatgtattgtctctataaatagagcacattaatttatattaaaattgaaaatttttgaaactataaataagcaaaagaaattaaaaacctataattctactgcccaaaaataaccaccgataacatttttgtttatatccattttgtccatttagtttgtttctatgtaaacatttttttaaaagagaagtttcaccctcaccttactatgttttggcttttttttctttgagatggagtctcgctctgttgcccaggctggagtgcagtggcgcaatctcagctcactgcaacttctgcctcccgggttcaagcgattctcctgcctcagcctcctgagtagctgggactacaggcgcttgccaccacacctggctattttttgtatttttagcagaaacagggtttcaccatattggccaggctggtctcgaactcctgactttgcgatccgcctgccttggcctcccaaagtacttggattataggcatgagccactgcgccggcctgttttttttttgtttttttgttttttgtttttttttgagacagagtcttactctgttgcccaggctggagtgcagtggcgcgaccttggcttactgcaaactccgcctcctgggttcaagcgattctcctgcctcagcctcctgagtagctgggattacaggtgccaccaccacgactggctaattttttttttttatttttagtagagacagggtttcaccatcttggccaagctggtcttgaactcctgacttcgtgatccacccgtctcggcctcccaaagtgctgggattacaggcgtgagccaccacgccaaggcttttttaatttctaattttttataaaggcagggactcgctgtgttgcctggacttgtctccagctcctgggctcaagcaatcctcccacctgcacctcccaaagtgctaggattacaagcatgagccactgtgcccggccctcaccttactgtcttctaacctcatttttgtgtctacacatcacgaccatgatcctctttgtagcactctcttcaacattagttattctcatattaaaacgggccatttacattggtaaacattttaaaaactgtgatgtatccatgctttggaatgcaacactggcacagtgattcatgcctgtaattccagaactttggaggactgaggtgggaggattgcttgaagccgggagttcgagactagcctgagcaacattgcgagaatctgtctctacaaaaaatacaaaaaaatttaggtgagcatggagaccagtaaaaggcaaaacagtagggacagaaaccaggccagtggctgccaggactgtgctgacgggagggctgagcatggtggcacatgcctgtaaccccagctacttgggaggccgaagcaggagaatcacctgagaccaggagttccagaccagcctgggcgacatggcaaaatcccgtctctactaaaaaatacaaaaattggccaggcatgcaccacagggcttttaggctcagccaggctcaggcggctccatggtgcttccaacaaaaattgaaaaaaaaaaaaaaaaaagaaaaaaaaattaaccggcatggtggcacacacacttgtatttccagctactcaggaggctgaggtgggaggatatcttgagcctgggaggtggaggttgcggagagctgcgatagtgcactccaccctgggcaacagagtgagaccctatctcaaaaacaaaacaaaaacaaaaacaaaaaacaacccagccataaaaaggaaagaactacagatgcactagtaatacagatgaatctcaaaaacattatgctaagtgggagaagtggggcacaaaaagctacataatgggctgggcgcggtggctcacacctgtaatcccagcactttgggaggccaaggcaggcggattacttgaggtcaggagtttgagactagcctggccaacatggggaaaccccgtctctactaaaaatacaaaaattagccgggcatactcgggaggctgaggcaggggaatggcgtgaacccgggaggcggagcttgcagtgagccgagatcatgccactgcactctagcctgggtgacagggcgagactccatctcaaaaaaaaaaaaaaattagctgggcatggtggtgtacgcctgtggtcccaactactcgggaggctgaggcaggagaatcacttgaacccgggaggcggaggttgcagtgagccgaaatcacagcattgcactctagcctgggcaacaagagcgagactccttctcaaaaaataaaaaataaaaaataaaacaagtctccataatgaatgatgtcacttaaatgacattctggaaaaggcaaaacagtagggacagaaaccaggtcagtggctgccaggactgtgctgatgggagggctgactctaaccacacatgagggcacttcgtggggtaatgaaaattgtccatgtcttgactgtggtagtgattacactaccattacacatttatcaaaactcactgaactgcatactcaagaagggtaaatttcactatatgtaagttacttgacttctcccaccccccccgccaaaaaaaacaaacgaaagtgctgtccaaatataaagtatcattagacattatagcacttttctcagagattctgaaatacctttgtgaaatgtgacaaatgttaaaaaaacaaaaacaaaaccccagccaggcgtggtggctcatgcctataatctcaacattttgggagaccaaggcaggaggatcccttgagcccaggagtttgagaccaaccctggcaacagagtgagaacctgtctctacaaaaaatacaaaaaaaaaaaaaaaaattagctgggcatagtggtgcatgcctgtaatcccagctaccagggagaattacctgagcccaggaggtcgaggctgcggtgggtcgtggtcacaccactgcactccagcccgggcaatagaatgagactctgtctcaaaaaaaaaaaataaagcaacttggaaaagatcaagtatcctttagaaaaatatttgttgttgagtgttctgtctttcagaaaggccattttccactctggcaaatgctcatgtgtcaggttgctggtcccacaagagagcagttgaccacttgggctatttgaggactttccacaacatcatcagcttttttatttttaaaatatgaggctggagtgtagtggcacagatcatggcttactgcagcctctaactccggctcaagcaatcctcccacttcagcctccagagcaactgggactacagtcacatgccaccacacctggctaatttttaagttttttgtagagacagggttttgctatgttgaccaggctggtctggaactcctggcctcacatgatcctcctgccttggcctcctaaagggctgagattacagatgtgagccactgtgccaggcccagcttcttttttttttttttttttttttttgagacgaagtctagctctgtcgcccaggctgcagcacagtggtgtgatctctgctcactgcaagctccgcctcctgggttcacgccattctcctgcctcagcctcccaagtaactgggactacaggcacctgccaccacgcccggctaattttttatatttttagtagagacggggtttcacctgtgttagccaggatgctctcgatctcctgaccttgtgatccacctgcctcggcctcccaaagtgctgggattacaagcgtaagccaccgtgcccggcccccaggttctttttttaatgccactatagtaaaaataaacaatagtgtcagaactgaacagttataggaaacaagaatgataggccaaaaagtgaaaaaatgaaagaaaaaaaaaaagaactgaacaatcaacaccccctccccccacttgatcttcccatcccagccaagccagtcctcttccctccagggaaagaatacaggtatttctggctcatctcctcttgggccagactattaccatcctaatgaacactatactccaaaagcaaataaactgcaatcaaaagtgagattaccagacagcagatttctaaacagaattggaagaacagtgaatcaatgcaaaggtgcagtgctaacagtaagaaaaatcctgcccaaatcccccagcattgcagcaaaatcccccttgacagtctgcagagcctgatcaatgccccttattcaacagagtatattcgtgacaaaattccaatccagcaaaggaactgtagtagttctggagttcataatgggctctgaactattgtaaatgggagtgaggatataatctactcttacatagaaaaaacaacctggccaggtgcggtggctcacgcctgtaatcccagtactttgggaggcccaggcaggtggaccacgaggtcaggagattgagaccatcctggcgaacacggtgaaactccacctctactaaaaatacaaaaattagctgggtgtggtgtgacgcatgcctgtaatcccagctactggggaggctgaggcaggagaatcgcttgaatcagggagtcagaggttgcagtgagccgagatcgcgccacatcagcctggtgacagagcaagactccgtctcaaaaaaaaaaaaaaaagaaagaaagaaagaaaaaaagaaaaaacaacttgtcagttatctgtgttcagggcttatcactccctcccccagggcctagcaaagcctttgcccatatgaggcgctccaagaatgttggtggagtcatggagcaggatagtcaactgctctgggaagagggcccccttacactgtggagctatctgtgatctatgttaaaactgacccacaatgaaaacaacttccctggcctttttttttttttttttttttttttttttttcagacagagcctcactctgtcgcccaggctggagtgcagtggcgggatctcaattcactgcaaccttcacctcccgggttcaagcaattcttgtgtctcagcctctggagtagctgggactacaggcacgagccaccatacctggctaagtttttgtatttttagtagagatggggtttcaccatgttggccaggctggtctcgaactcctgacctcaggtgatccgcctgcctcggcctcccaaagtgcagggattacgggtgtgagccaccacacctggcctggatttcttcttctaaagtcagggaggtttgttaacattgcttccatggaggctctacactcagcctcatttcatttcaacaaagggcaggacctgttccaaggctggcttggggaggaggagcggggctgaatgatgctgattgtaggggtgattgagctgaaaagcaagtctcctatcacgaagctcatgggctgggcatggtggctcacgcctgtaattctagcactttgggaggccgagtcaggcagatcgcttgagcacaggagtttgagaacagcctggccaacatggcaaaacccttctctactaaaaatatgaaaattagttgggtgtggtggcaggtgcctgtaatcccagctacttaggtggctgaggcacaggaatcgcttgaaccccggaggtgggggttgcagtgagccaagatggtgccactggactccagtctgggcaagagagcaagactctgtctcaaaaacaagacaaaacaaaacacacacacacacacacacacacacacacgcacaaaagaaagaaagaaactcaggggctagtgggaaagagaatcctgggaacaaataattacgatttgataataagtagctcactggttagttaagcatgctctgtgtgaagtgatctaccccaataaccttgtgagctgagaattataaccctgttacaaacggggaaactaaggttctcagatgttaaggagtttgcccaaggtcacacagttaataagcagaaaggccagtattgaaacccaagcagggctgggtgtggtggctcacacctgtaatcttgatgctttgggaggcccgaggcgggagaatcacttgagtcaaagagtttgagaccagcctgggcaatacagtgagacagccccccctccccccaccccgctctctacaaagcgaaaaaagaaaccccaggcagtctgacttcagagcttgcactcctaacccctgaagcagaggaatgagggcccaaggtgtgtttattatggccaagaactatcaggagaggcctttagaaatgtggggcagcactgtgagcccaaggggagaagaggcagatggcaccatggcttggtggctgtaagcagcctggtagtctagatgctccagtaggatgcctgccatgaggcagtggagatggagcactggaggaggtcagcagggccaggttgtcagggctgagtgttctaagttaggagttctgactttcctctggacacctggcagaaccctgagcagtggatctgttgggtgacatgagacttgtgcataagaatggtcacacaggaaatgggctggactgtggaagctgtgaggctgaagactccaggggggccatcagaaagccaatgttgtgatccaggtggggcagcagcggctgaattgggcagggcaaggagctccctggtcagaatctgtccggtggccagctgggtgcaactcttacacagcacccggacttggacctgcaccagatggcttggcgtgctggaagcccttctagtgtcaggagcccatttctgaatcaagcaggaccccatggatcacaggacagcactgtctgacccctggccagtgaccacagtttcagtctccaggcctcagtttccccatctgtaatatgagtgagttttaaacagattgtattggccgggcatagtggttcacacctgtaatcccagcactttgggaggccgaggcaggcagatcacctaaggtcaggagttcaagaccagcctggccaatatagcgaaaccctgtctctactaaaaatacaaatctagccgggcatggtggaatgcgcctgtagtcccagctactcgggaggctgaggcaggagaatcacttaaacccaggaagcagaggttgcagtgagcgaagatcacaccactgcactctagcctgggcaacagagcaagaccccatctcaaaaaataataataataaataaattgatagtattttaggtaccttcccgttctgactttctgtgaacttttttttctaattttttatttttacttccttttttgtgaattctttttattaatacattagattctcatggtctcaagctacatgaggctctctgaaaactcatgaatatatctggacactgttcaaaggcactcatctgttcctctttggaacttttggacagtaaacttgctggtggaagcagaaattgaaagaaggtagagatcaacttggcactgtgaggattaattttgtgtcaacttggctggaccacagtgcttagagagttggttgaacactattctagatgtttttctgaaggtgtttatggatgacactaaattttttttttttttgagatggagtctcactctcacccaggctgaagtgcagtggcacaatctcggctcactgcaacctctgccccccgggttcaagcaattagattctcttgcctcagcctcccaagtagctgggaatataggcacctgccacagcgcccagctaatttttgcatttttagtagagacagggtttcaccatcttggccaggctggtcttgaactcctgacctcatgatccacctgtctcagcctcccaaagggctgggattacagacgtgagccaccttgcccggccgacactaacatttaaatcagtggacttttgccaggtgcgatggctcacgcctgtaatcccagtactttgggaagctgaggtgggcagatcacgaggtcaggagttcgagaccagcctgaccaacatggtgaaaccccatctctactaaaaaaaaaaaaaaaatacaaaaattagccgggcgtggtagtacacacctgtaatcccagctactcaggaggctgaggcaggagaatcgcttgaacctgggaggcggaggttgcattgagctgagattgtgccattgcactccagcctgggcgacagagtgggattccatctcaaaaaaataaaaaattagtggacttttaagtacagcagcccccccttatccatgtgggatatgttccaagacccctagcagattcctaaacccacagatagtcccgagccctatacatatgtttttctcaatctgacaacagtacctgctactaaatgattaacagcatatatagcatgggtaccctggagaaaggattgattcccataccacaacatgaattcgtgtccaggatggagtgggccagcacgagatttcatcatgctactcaggatggtaggcaattgaaagcttataaattatttctggaattttccacttaatattttcagactgtgagtaaatgaaaccagggaaaatgaaaacatggatacagggggacctattgtatagcaaattcttctccataatgtgggtgggcctcatccaatcagttaaagccttaaaaaaaaaaaaaaaaagcctggcatcctatcccttcctccccagcaaggaattctgatagcagacagcctttattttcctattttttttagagacaaggtctcacgccattgctcagactggtcttgaactcctgggctcaagtgatcctcctgccttggcctcccaagaagctgggggtacaggtgtgtgccacagtgcctggctagtagataccctttgaactgcaactcttcctgcatatgcagcctgctggtctactctgaagactgaccatgtcactgtaatcatgtgagccaatcttttaaaataaaaatctctctccccaatacatatacatatacatatgtacacatacatcctgttgattttgttctctgagaactgtgattaacactggcaccatttatcaaaactgctcatactggaccaggcgcagtggctcatgcctgtaatcccagcactttgggaggccaaggcgggtggatcacctgaggtcaggagttcgagaccagcctggccaacatggcaaaaccccgtctctactaaaaatacaaaaaaattagccaggtgtgttggcatgcacccgtaatcccagctactcagaagactgaagcaggagaatcgcctgaacccaagaggcagaggctgcagtgagccaagattgcgccgcttcactccagcctgggtgacagagtgagactccatctaaaaaaacaacaaaaaccacaacaacaacaaaaaaacactgctcgtgctggttacaatccatccacaaaactgaatatgctacagccacagggaggggatgcagactctttataaaatgatatggaaagatctcctagatgtattaacaaaagtatgtagagtgtgcaattatctgtgtaaacaaaaaagggtgtaaaaataaaaattcacgttgtttattttttcattttttgagacagggtctcactctgtcgcccaggctgcagtgcagtggtatgactgatcacagctcactgcagcctctaactcctaggatcaactaatccttctgccccagcctctcaagtggctgggacaacagacatacaccatcaagttcagcaattatttttttttttcccgatatggagttttgcctgttgcccaggctggagtgcagtggtacgatatcggctcactgcaacttctgcctcccaggttcaagcaattctcctacctcagactcctgagtaggtgggattacaggtgcctgccactacaactggctaatttttgtatttttagtagagatgcagtttcgccatgttggccagactggtcttgaactcctgacctcgtgatccacctgcctcagcctgccaaagtgctgggattacaggtgtgagccactgtgcccagccacgttcagcaaacttttaaattttttgtagagacagggtctccccatgttgcccaggctggtttcaaactcctggcctcaagcaatcctcctgcctcggcctccaaaaatgctgggattacaggtgtgagccaccatgactgaccctattgtttctatgtggggaaaaataaaaacctgtggaagggtacctaagaaactaacaacagaggttatctattggaacaggccagtgggagaattaagtaaatgggagacaagggagaagaaaccttttgttttactcttttttatactctttgataaatgtacatattctatcacccagcagttccatacccatgtaattaccttataaacatacttccatatgtgcaaaacgacatatatacaaggatattctgttgtggcattatttgtaagagaaaaagaatgggaacaacctagacacccatcagcaagaaactgattaaataaatcatccatttgaagtaaaacggtgcatttgttaccaagaatgacgcagttctctgtgttctgatatggaacgatttccaagttgaatggaaaaaagaaaggtgcaggacggtgggtacataatgctaccatttgtgtgggaagaaaagtgaaactatatgcatatccgtttgcaaatgcagttaatgtcttcagaacacagaataaactaataacagtggctacctctggggaagagaactgggtaactgggaaacggtggtggggaggggttattaccttacactgtaccttttaatcatgggcatcttttagctattcaaaactttataaaatttctgaggaggtatttgccaggcgcggtggctcacgcctgtgatcccagcactttgggaggccaaggcgggcagatcacgaggtcaagaaatcgagatcatcctggctaacatggtgaaaccccctttctactaaaaatacaaaaaattagctgggcgtggtggcgggtgcctgtagtcccaactactcaggaggctgaggcaggagaatggcgtgaacccgggaggcggagcctgcagggagccgagatgccgccattgcactccagcctgggtgacagagtgagactccgtctcaaaaaaaaaaaaaaaaaattctgaggaggagggtagtggaggaggaggagcaggaaaagtcatctgtacacaaagcatttcacatgttatgctttttcctgtggcttttaacctgagtttccccggaattgctcttacaaattccaactttggaacagacccaatttcactggagacccaggatcgtcacaaaaccaggaagataatttttaaagacaagagcaagcactagctctctgcaaggtacacgactctttaatccatgcagaaagacaactggatccagaccttttcttcagaacctttttattcatcatctaaccaacagaggtggttggctcgaactcaaactaaaatggcctcaaaaggcccacctcgttacgacatgacagggcaaaaccagaagtagggacagagtttagcctcagttctctgcagagaagaccaagcatgtatttacacacaggtgcctcattaagaactgattggcaatgttccaccagcacagacccagagtgtgcagaaatccgtgggggctctgtatatgtgtcattcagacaatccgccgattcctcagccataaacaagctcttgctttttgggaggagggtgatcagcatgttatcttgaatgatggcaccatttgtttactctggaactttgaaggggaggtgacaacttattttctcccctgaatctgagatgcagtggcctgtcagagtatctaaaaatgtgtcctggaagacaggtggtggtggttgccctaacagagagtttacagggtaattgtgttgggctctttcagtacttaatcctgctgtttttcagaaaccctttgcacctgggccccatggagccagcagggccccatggagcatcccacaggcctgtgagtgaagtgcctctcagagcagtcacccagggaagggaggagggcagggaacggggccaggggagatgcagggacagaaatcagcagaaacactccatgctggttctgactcgctccatctcgtgcaggaagctgtagaactgaggcaaggttaattctggggagagaaaattcagcttcagataaatgtttccaactccacagaatcatccaagaaaattaatttccacccggaggattttttttttcttttttggcttaatacatctaagcagctcttgatgggtaactgatcataataaagaactgagagacttgaatgcagaaggttctctgctccaaaggaaaaaaaaggggagtgagtgttcaaatggcacagctccatggcacaaagagatgaaagggtatcattcgggatgttcaatgtgacttctatggcaagagcttcttgctcgtcaaccttcttcttcaatcccagccattccgttcccaccctttccctttttcaaaacggctcttcaactgtgggggctccaacctgccagtggctttctaacactccttgtgccatctttcaggagaggaaaggcagtggaacagctactccacagctggcaatgactgtttttatagaagacatgatttgtggtgagcgtcaccagcccctgattgcagagaacacaaaaaaggtgaagaggctcaagtgggaattcagactcacctatatacacattttcggtttgatttcctttcttaaccaccaactttagctgatgaaagaaaaagaaataatttaaattaaaatgatgacaactgggcaaagaaattcttaaaaccctttgacttaattaagcttccaacctgagagtcatacaggagcagtctggatcatccaccaccgaaaattctaacaattcccatgattacaggaacaatcacgcatcaatgaataacactaggatctattcatctaaaagtaggcatgttagtgactacatctttagctggccacactgctctgagatatataaggtacttcagtaaaacatccatttaaatatccatttaacccaatgtagatataatttttaaccaagtcaaaaatctacccattttcaaggatcaggagaagacttacttgtaaaaatatacttcccactttctccaattcgctgctcccagatgtcactgtgacaaaaaaaaaaaaaaagagagagagagagagaaataacaagtgactgattgaggactgaccctgaagaccccagttttgcagctgtccagcagaagccatgtgggggcaagtatgagggcagcaaggtgtgcttttggaaagtcaacttatccagagccatgaaacagctactgaatgtggacagaatacaaaacagcagctgctgccccaacagtgctagggactaggtcatgccttccccatagtggctgtgtcacagcctctgcaccccaaccctgtaccacccaaataacccaggactggttgtaactagttacctccaaatttccactccatatctatgagctggttaatcatcagagtctgacctatggcccatcgagcaagggtgggagcattctgcttccactggaacaaaagcaaaagacaaagtcaattacaataggaaaatctccccctctccatcctgccctaaacattgcaatatttagcattgacacagatagtggggagggtgcagaagatagtggggagggtgcagaacgaagggctcagtctatatgcacatacctagggatggaggagggcacagagtggcagaccacaacattaatgttgtatttttcattccaagatttaatccatcttggaaaaaaaacagtgctgccatcatactggcccccacatggcttctactagacaattgcaagatggggtcttcagggtaagttctcaatcagtcacttgttatttttctctatttttgtcacagtgacatctgagagcagtgaattggagaaaggaggcatatatatgtgtatatatatacatacatatatatgtatatatatatgtgtgtgtgtatatatatatatatatatttttttttttctttgagatggagtctcgctctgttgcccaggctagagtgcagtggcatgatcttggctcgctgcaagctccacctcctgggttcacgccactctcctgcctcagcctcccaagtagctgggaccacaggcgcccaccaccatgcccagctaattttttatatttttagtagagatggggtttcaccatgttaggcaggatgatctcgatctcctgacctcgtgatccgcccgccttggcctcccaaagtgttgggattacaggcgtgagccaccgggcctggccagtaggaggtatatttttacaagtaagtcctctcctgatccatgaaaatgggcagatttttgactgggtcaaatcaggagaaatgattagagatacactgaatagtgctggttaaagctgtgtgtatgacatgcgcttgaagccagatgaaaaccttaggctggggaaatgatgatactgataggtggtttggccttacttggcatttcccattgttttctctcttcatgatataaaagcaaggggctggcggtggtggttcacgactgtaatcccagcactttcagaggctgaggcaggtggatcacctgaggtcgggagttcaagaccagcctgaccaacatggtgaaaccccgtctctactaaaaatgcaaaattagccaggcatggtggcacatgcctgtaatcccagctacttggaaggctggggcaggagaattgcttgaaccaaggaggtggaggttgcagtgagccgagattgtgccattgcactctagcctgggcaacgagagcgaaactctgtctcaaaaaaaaaaaaaaagaaagaaagaaagaaagaggtcgagcacagtagctcatgcctgtaatcccagcactttgggaggccaaggtgggtggatcacaatgtcaggagttcgagaccagcctggctaacacagcgaaaccccgtctctactaaaaatacaaaaaattagctgggcatggtggcatgtgcctgtagtcccagctactggggaggctgaggcagaagaatcacttgaacccgagaggcagaggttgtggtgagccgagatcacactgccactgcactccagcctggacagaatgcgactccatctcaaaaaaaaaaaaaagaaagaaaagcaagggatcttaatcagccattaaccttgattaagaggaattataccttttcagaaaagtaagtggctttctcctcactaagacctataagagaacagaaggagatattaacataataaaaagcctcagaagccagtcaccctgagcaaccctggccaatgacctacccagagttatgaaatccgcctggacctgcttggctgtgagactcttcttcaaagcacctgggaggcaggggagaaatcagttagaaaggcagaccagtgaattagtcggcaataagtatttaatgggcacaacctatgtgacctaaaggacaaaaggaacacccaaagactggccagctccaagatctcaatccagccatggggaaatagcatccgaaatgaccagaaaacaagaaagacagtacattttacaatttatttattttatttaaaaaatatatttatttttgccgggcacggtagctcaagcctgtaatcccagcactttgggaggccgaggcaggtggatcacgacatcaggagatcgagaccatcctggctaacatggtgaaaccctgtctctattaaaaatacaaaaaaaaaaaaaaaaattagccaggcatggtggcaggcacctatagtcccagctactcgggaggctgaggcaggagaatggcgtgaacccgggaggcggagcttgcagtgagccgagatcacgccactgcactccagcctgggcaacagagcgagactccgtctcaaaaaaaaaaaatatatatatatatacttatctcaaaatatatatatattttttgagacggagtctcgctctgttgcccaggctggagtgcagtggcgtgatctcggctcactgcaacctacacctcctgggttcaagtgattttcatgcctcagcctcctgaacagctgggactacaggcgtgcgccaccacaccaaaccaatttttgtatttttagtagagactgggttttaccatgttgaccaggctggtcttgaactattgacctcaagtgatctgctcaccttggcctcccaaagtgctaggattaaaggggtgagagccaccatgcctggcacatattttttttttaattgtacaacacaattatttatccctccaaccagtgtgagagaagtcagagacaacagaaaagacttcacggacttggggatggagcaactggtctgaggaatgagtaaggatacgaattcctggagcaagaggcaggggagtgtaatgtcaggttgggcacagggggcaaccacctagagctccacaatgcattatgtagccactattgcatgtggttatgcaaattttaattaaataaaatttaaaattccattcctcagtctcactagctatttcctgtgtcaaacagtcacacaaggccagtgaccattatactgaacactgaagattacagaccatttacatctgcaaagaaagttctattggatggcattgtcctaagaagttagctttcacacagtacaccaagatggactaaacagactaacctctacaattcacaagtcacttccagaggggctgtcaaaacttctcagaagccctaggaacacttccctgtggtggtcaccttgttttgctaggctccaattcctgaaaacaaagccagcaatctgggcttctcaatgtttaacctgcaggctacatccccagtcacaatttggcaaccactctcaaattttccactttttagttcaccagaaaatgactaattaaagaataggaagatgccaaccaccatcaagggaaggccctgaacctataccctaaacccaagtccccacccccaactcactccagaaaaacaatcctaaaggctgttgtaccggtaaaatcaaccatataaacaaagggaggaaatcttttatctccaaaatcagactgagcaaggaagccacacggaataaaaaaggcaagaccccgggaaaccttagccataaaggccctctgagaaggtggctacttcccagccaatccaaataactcctaactaccatgaatacagtgtcttagtttatatccaattcaaacccaatgctttatttgacaatccccaaacactgggctttattattgtaactttttttttttttttgagacagtgagacacggtttcactctatcgcccaggctggagtgcagttgggcaatctcagctcacctcctaccacaccggggtgggtgggtggggctcaagcaatcctcccacctcagcctcccacatagctgggactacaggcgtgtgccatgatgcccagctaattttttgaatttttgtagggacagggtcttgccatgttgcccaggctggtctcaaactcctgacctcaagcaatccacccaccttggcctcccaaagtgctgggattacagacatgagccaccatgcccagctattattttaacttagtttaccaggaaacattaagcatttttgggagaaaatttggcaaatgcagatagtcaagaattgcactgccaagaattcacccaaccaagctgcacccaaaagcacgctgagatatacaggggaagctctttagcaatgtggatagtagggatgaaaggtcatggagagaccaggcacggtggctcatgcctgtaatgccagcactttgggaggctgagggggtggatcacttgaggtcagtagttcgagaccagcctggccaacgtggcaaaaccccgtctctactaaaagtacaaaaattagccgggtgtggtggcatgcgcctgtagtcccagctacttgggaggctgagggtgcagtgagcagagacggcaccactgcattacagcctggcaacagagcaactctgtctcaaaaaaaaaaaaaaacaggctgggcgcctgttacaaaattagccaggagggtgaggcaggagaatcatctgagcctggcaggtggaggttgccgtgagccgagatctgccactgcactcaagcctgggcgacagagcgagactccgtctcaaaaacaaacgatgacaaaaacaacaaacaaaaacctcaggtcagaccatgctattttttctgctcaaaaccctctactatctcctatttcactcacagtaaaatccaaaggttgtacaacaccctgcatgctctggcctcctcttagaacccctaggctctctcccttgcttactgtgctatttttagaatatgccagacagctttctacccctggccatttgcccttgcagttctctgcacatagctcatcccttcgcttcattcagggttctgcctgactcttacctcctcagaaaggatccccgaccattctatttcacattttttctttttttacttttttttttttttaatctcattctgtcacccaggctggagtgcggtggtgtaatcacggctcattacagccttgacctcctgggcttaatggatcctcccacctcaggctcctaagtagctgggactacaggcatgctccacaatgcttgactaatttttaatttttttttctagagatagagtctcactatcttgccagctcaaactcccgcactcaagcaatactcccaccttggcctctcaaaatgctgggattacaggcatgagctgccaatcccagcctcattctaatttaaatagcactgccctttactcatactcgtataatgctgtgggatattctgcattgcatttataactacccaactttatgttatatatttattatcaatttttccactagaacaccagcttgataagaacaaagactaggctcattttgcctactgctgtgtcccaagctctgagagaaatgcctggcaaagtttattggttggcactcaataaaagcacgttgaatgcaagaatccttacaatggattgctatccaggcttaaaaaaaattatgtaaggccaagtgctgtcatcccagcactttgggaggctgaggtgggaggatacctgagcccaggggttcaagaccagtctgggcaatacagggagaccccatctctacaaaataaaaaaattagcaaggtatagtggcacaggcctgtggtcccagctactcaggaggctgaggtgggaggatggcttgagcccaggaggttgaggctacagtgaaccataattgcatcactgcactccagcctatgtaacagggtgagacctcatctcaaaaaaaaaaaaaaaaaaaatagatgtagctcagtagctgttgatggaccaatctgcataatataatgtcaagaaaaaaaggaaaggcacctataatcccagcactttgggaagctgaggtgagaggattgcttgaggctaggaatttgagactagcctgggcatcatagcaaaaccctgcctctacaaaaataaaaataaaaaattacttgggtgtggaggtgcacacctgtaatccagctgctcaggaggctaaaataggaggatcgcttgagcccagaagtttgaggctgcagtgagccatgatggcaccacttcactccagcctgggtgacagagcaagactctatctctaaaaataaataaataaaaataagtgttactttggccgggggtggtggctcacgcccataatcccagcactttgggaggctgaggcgggtggatcacttgaggtcaggagtttgagaccagcctggtcaacgtggtgaaaccccgtctccactaaaaatacaaaaattagctgggcgtggtggcacacgcctgtagtcccagctacttgggaggctgaggtaggagaatcgcttaaacctgggaggcagaggttgcagtgagccgagatcacaccactgcactccagcctggacgacggagtgagactctgtctaaaaaaaaaaaatgttacttaaaaaaaaaaaaaaaaggaaacagttaaaggaacaaggccacaacagtcagcaactgacagagccaagtggcttataggccagagggtccccacaccaagttctttctacaccaggtcattctcagacgctatcttggtgctgcggtatcaggcaatgccttgacagttgctgacaatgaagtcaacaaagctgcagggatggaagagcaagctctccatcctgaagttacctctggagggcagaggccagacttgaaacatggattggcatcatgctaggcctcaagctcttaacttctttttcagctttttcctgtggtgattcctttgtcctaagcaaatgccagccacaagacagacctgcaacatttgaccttatgtcagacagaatgaaaattgtgtggggcctcttggagggtggggtggggggagggatagcattaggaaaaatagttattccatgctgggcttaatacttaggtgatgggctgggcgtggtggctcgtgcctgtaatcccagcactttcggaggccgaggcgggtggatcacaaggtcaagagatcgagactgagggctgggcacgatggctcatgcctgtaatcccagcactttgggagtccgaggtgggcagatcatgaggtcaggagttcgagaccagcctgaccaacatgatgaaaccccatctctactaaaaatacaaaaattagccgggcgtggtggcaggcgcctgtaatcccagctactcaggaggctgagacaggagaattgcttgcacccgggaggcagaggttgcagtgagccgagatcgtgccattgcactccagcctgggccacagagcaagactccgtctcaaaaaaaaaaaaaaaaaaaaaaaaagagagagatcgagaccatcctggacaatgtagtgaaactccgtatctactaaaaagtataaaaattagctgggcatggtggcatgcatctgtagtcccagctacttaggaggctgaggcaggagaattgcttgaacccaggaggcagaggttgaagtgagccaagatcgcgccactgcactctagcctggtgacagagcaagattccgtctcaaattaaaaaaaaaaaaacctaggtgatgggttgacaggtgcagcaaaccaccatggcatactatgtaacaaatctgcacaccctgcacatgtaccccagacctttaaaaaaaaaaaaaagaaaattgtgtaaactccaacagctgcagtcagcagaacatgacacgtggggaaatttaagaacatccttcttcaaacacagataactttgagatggtcccttttttttttttgacacggagacttttttttttttttttttcgagacagagtctcactctgtcccccagactggaatgcagtggtgcaatcttggctcactgcaacctctgcctcccaggttcaagtgattctcctgcctcaccctcccaagcagctgggactataggcacgcaccaccatgcccggctaattttttgtatttttagtagagaccaggatggtctcgatctcctgacctcgtgatccgcctgccttggcttcccaaagtgctgggattacaggcgtgagccactgtgcccgtcctctttcttttttaatttcttttttttttttttttgagacagagtttcacttttgttgcccaggctggagcacaatggtgcaatctcagctcactgcaacctccgcctcccaggtgcaagagattctcctgtctcagcctcccaagtagctgggattacaggcatgtgccaccatgcctggctatttttttttgtatttagtagagatgggctttcaccacgttagtcaggctggttgtgaactcctgacctcaggtgatccacccgcctcggcttcctaaagtgctgggactacaggcgtgcgccaatgcgcctggcaacaggcaccaattttcaccagaactgctgccttagccaaaccctcaaagctgtcaaacaatatgaaggacaaaacaaagggaagtgagggtgacgacttcagttttgccaagacggttggaaaaacagcaaacattgttcttattcagtgtacaaatgggagcccaaggaatggacacaggcttggtgaaaactcctggaagcagatgggagaggatggagagctgctttcatccagtcagtactgaccctgaaggctgaccagctgaagccaccctgtgaggctcacagagaacagaggtccgtagtcacacacgcacatttactgagcactgccatgtgcctgcactgtgctagatgctgggaaacatcaatgaactgaacagacaacaatctctgcccttatgaggcttccattctactggcaggagaaagaccacagcaataacgtaaaacataagccatacagggtataagaagggggaggctgggcatggtggctcacgcctgtaatcttagcactttgggaggccgaggcaggtggatctcaaggtcaggagttcaagaccagcctggccaacatggtgaaaccccatctctactaaaatacaaaaattagctgagcgtggtggtgagcgcctgtaatcgcagctacttgggaggctgaggcaggagaatcgcttgaacccaggaggtggaggctgcagtgagccgagatcgtgccactgcactccagcctgggcaatagagtgtgactctgtcttaaaaacaaaaacaaaaaaacccccaaaaaagaagggggaaagtgccatggagaaaaatagtagggtggtgcatgaggctggcggtcctggggaatttagttcaatgtttgattaaatgccacttatgactacatttcattgctgattattcttttttgtgtgtatgttgctaaaaagaactcgttggggagtggggaaggggagttacctccttttcataaaaaaataaaataaaataaaaatcagttacggatcacccacaggggccagatatcttgctaagtattaaaataaaaatagggccgggcacggtggttgtaatcccagcactttgggaggccgaggcaagcggatcacctgaggtcaggagttcgagaccagcctggccaatatggtgaaaccccgtctctactaataatacaaaaaattaaggccaggcacggtggctcatacctgtagtcccagcaccttgggaggctgagatgggcagatcacgagggcaggagttcgaggccagcctggccaatacggtgaaacctcgtctctactaaaaatacaaaaattagccgggcacggtggtgcatggctgtagtcccagctactcaggcggctaaggtagaataatcgcttgaacctgggaggtggaggttgtagtgagccgagatcgtaccactgcactccagcctgggcaacagagtgagactccatctcaaacaacaacaacaacaacaacaacaacaacaaaaattagccaggtgtagtgcgcatgcctgtaatcccagctactcaggaggttgagaggcaggagaatcgcttgaacccaggaggcagtggttgcagtgagccgagactgcaccactgcactccagcctgggcaacggagtgggactctgtctcaaaaaaataaaaataaaaataaataaataaataaataaataaatgaaataaaaataggtgaccaagcagggtggctgagcctggggagatcgaggctgcagtaagcagagattgtgccactgcactccagcctgggcaacacagccagacctagtctcaaaaaataataataataataataaaaaaacaggcagccaggctaggtggctcatgcctatatcccagcactctgggaggctgaggcaggtggactgcttgaactcaggagttcaagaccagcctaggaaacatggcaaaaccctgtctctaccaaaaatacaaaaattagccgggagtggtggcatgcacttgtggtcccagctactcgggaggctgaggtgggaggctcactgaagctcaggaagtcaaggatacagtgagcagagactgtgccactgcactccagcctgggcaacacagccggacccagtctcaaaaaaacaaacaaaaagaataaaataaaataaaaaaacaggcggccaggcgtgatggctcatgcctatatctcagcactttgggaggctgaggcaggtggactgcttgaactcaggagttcaagaccagcctaggaaacatggcgaaaccctgtctctaccaaaaatacaaaaatcagccaggagtggtggcatccacctgtggtcccagctactcgggaggctgaggtcggaggcttactggagctcaggtagacaaggctgcagtgaactgtgatcatgccactgaactccaacctgggtgacagagcgagattctgtctcaaaaaaaataaattaatcaaaaataaataaattaataaattaattaaaaacaggcttaaatagtggccctactgccaagttatctgtaatctcagctaggagataacacataataataatgacaatcataatattagcagcagtgtgctaccacttagtgaagtgagcaccttattacatttattatctttatccttataataaaagtatgagtctactattagttctcaggtaccattgggtctcagagctgttaaatccctggtgagtaagcaagcacagaagggccacccagcagccacgtgctggactggagtcctatctagatcctgatgggaacccattccaaacaaacaaaatacaggagacaatggggaaattaatactgaccttgtattttccttttagatatgataatggcattgtagtttgataagggggaaattcctttttttcttttagagatagacaactaggtattcaggaataaagtatgtctgatattgcctttaacataatccagtttgggccgggcgcagtggctcacacctgtaatcccagcactttgggaggccgaggcgggcggatcacgaggtcaggagatctagaccatcctggctaacacggtgaaaccctgtctctactaaaaatacaaaaaattagccaggcgtggtggcaggcgcctgtagtcccagctacttgggaggctgaggcaggagaatggcgtgaacccgggaggcggagcttgcagtgagccaagatcgtgccactgcactccagcctgggtgacagagtgagactccgtctcaaaaacaaaaaaaacaaaacataatccagtttgcactgggcatgttgcccacacctgtaatcccagctactcagcagactgaggtgggaggactgcttgaggccaggagtttgagactagcccaagcaacaaagcaagacccccacatctctaaaactaaactaaactaaagtaatccagttcagagagcagtaaggagccatgggtggggtccacatgaatcaatctggccatgggttagtaacttttttttttttttcataatatggactctagctctgtcgtccaggccagagcgcagtgtcaggaactctgctccccgcctcccgggttcagcctccaatgtagctgggactacaggtgcccaccaacatgctcgactaattttttgtatttgtagtagagatgtggtttcaccgtatcagccagaatggtcttgatctcctgacctcgtgatccacatgcctcggcctcccaaagtgctgggattacaggtgtgagccaccgtgcccagcccgggttaataacttttgaaggattttctttggtttgttttttagagacagggtcttcctccgttgtgcaaactggagggcagtggtgtaatcatggctcactgcagcctggactcctgggctcaaggtatcttcctgtctcagcctctgaagtagttgagactacaggtgtgcaccaccatgcccagttaattttttttttttttttttttttaagacagagtctcactctgtcacccaggctggagtgcagtggtgtaatcccagctcactgcaacatctgcctcccaggttcaagtgattttcatgcctcatcctcccaagtagctgggattacaggcatgtgccaccacgcccagttcatttttgtatttttagtagagacagggttttgccatgttggccaggctggtctcaaactcttgacctcaagcgatccgcccacctcagcctcccaaagtgctgggattacaggcgtgagccaccatacctggccaattttttttattttttgtagaggtagtgtctcattatgttgcccaggctgttcttcaactcctggcctcaagagattctccccctttgacttcccaaagtgctgagattacaggcatgagtcattgtgcctggctgaagtcaggtgtttcaaagaattacatactaaatagtacaagaaaaacattttttaaaaaaggcaaaaaaggccaggtacagtggctcatgcttgtaatctcagcactttgtcaggagtttgagaccaccctggctgacatggtaaaaccccctcttgaccaaaaaagaaaaaaaaaaagagcctggcgtggtagtgtgtgcctgtaatcccagctactcaggaagctgaggcaggagaatcatttgaacccaggaggtggaggttgcagcgagccgagatcgtgccactgcactcgagcctcggcgacagagcgagactgcctctcaaaaaaaaaaaaaaatcaataaaataaaaaggggagccgggtgcggtggctcacgcctgtaatcccagcactttgggaggctgaggcgggcagatcacaaggtcaggagatcgagaccatcctggctaacacggtgaaaccccgtctctactaaaaatacaaaaaattggccgggcgtggtggcgggcgcctgtggtcccagctactcgggaggttgagccaggagaatggcgtgaacccgggaggcagagcttgcagtgaaccgagtttgcgccactgcactccagcctgggctacagagcgaaactccatctaaaaaaaaaaggggggccggacgcagtggctcacgcctgtaatcacagcactttgagaggccaaggcgggtggactgcctgagctcaggagttcgagaccagcctgggcaacacagtgaaaccccgtttctactaaaatacaaaaaatcagctgggcgtgacggcatgggcctgtaatcccagctacttgggaggctgagacaggagaatcgcttgaactcaggaggcggaggttgcagtgagcagagactgtgccattgcactccagcctgggtgacagagcgagactctgtctcaaataaatacattaataaaataaaataaaatgccaaaaaagatcagtactttacaaagcttttacttgactctccccctgccaaaaaaaaaaaaagaaaccaaaaagttccatcattaactgtgcttcacagatactggttaagcaagtttctttactgtaggacttttcagaacctgagatgtgtcaatgtgtgcttgaatctccagggttccaaggctggggttgcggggagagtatttctgactctggacacaccaatttgaggaagactgatctggtggtttcttaaggccacttcagctctaacaaactgtacttctacaataagagcttcttgcacaggcaggaccaggtcaaaggaagaggacactgatgagggcctggaggctcttacgttgcagattagattaggaaaggccttgaatgccaaactgaggcctacagacttcattacgcaaggtaaacagttgagagaagcaggatgatccaagttgtgctgtagttaagtgtgctccagggcaaactggagtctggatgggagaatggaggtggagatgtaactgccataactaggcatgtagggctaagaaactgttctgggatggcagcctttgggactagaaagaagggatgcacaaggacaaaggataagaaggggacaggaaggccgggagcagtggctcacacctgtaatcccagcactttgggaggccaaggtggggtggatcacctgaggtcaggagttcgagaccagcctggccaacaaggtgaaaccccgtctctaataaaaatacaaaaaattagccaggcatggtggcgggtgcctgtaatcccagctactcaggaggctgaggcaggagaattgcttgaacctgggaggcggagctggcagtgagccaagatggcacctttgcactccagactgggcaacaagagcaaaactccatctaaaaaaaaatataataaaataataaaacttaggaggctttgggacattaactagcccagacatacattcacatactcattattaggtaaaagttttatcccataatttgacataaaggaataggactgaacactagcagctctatcaataaataaaggccataacagcctggcacagtaacatgcctataatcccagctacttgggaggttaagacaggagaatcatttcagccaaggacttccagaccagcctgggcaacatagcaagaccctggctcaacaaaagcctcaacaaaacaaaggttacagttgagcaagcactgtgttaagtactttacaggcattcatctcttcattcctaacaccgcaataagctgctattattattctacttttcagaaaagaaactgaggttctacaaggctgatttgtccagaaccaaatggctacattcagtgatgggaccaaaactcaaatcagagtgagcctgaaaagcccatctcttcactggtatgctgagttcctcaattttctctgtatctatagaaaatgatctgctatacgccgggcacagtggctcacgcctataatcccatcactttgggaggctgaggtgggcagatcaattgagatcaggagttcgagaccagcctggccaacatggtgaaaccccgtctgtactaaaaatacaaaaattagccgggcatggtggcacatgcctgtaatcccagctactcgggaggctgaggcaggagaatcgcttgaacccgggaagcagagattgcagtgagccgagatcgagccattgcactccagcctgggagacaagagtgaaactccgtctcagaaaaagaaaaagaaagaaaaatatagactaggccgggcatggtggttcatgcctgtaatcccagcattttgggaggccaaggcagacagatcgcttaagcccaagaatcaagaccagccagggcaacatggtaaaacctcgtctctacaaaaaatacaaaaattagccaggtgtgttggtgcaccgtagtcccagctactcaggaggctgaagcagaagaatcacttaagccctggagttggaggttgcagtgagctatgagaatcagtctgggtgggaccttgtcccaaaataaataaatacataaaaagaaggaaaatacagactcaacatcccctgggagggtcacagcatctcctaaattctattcaattcgctctgcacgtactgagcacctgctttatgccattaccttgcttctaactatggcttaggaaagaacaagactcgcccctgagtttgaggaactatctattagagccatgagacagatacatcagatacaaacaaatcagcaggaacaatagaaacctgtaaattagtactgaccaaaatgatagttacagataaaaaacatatctcagatgctggaaggggaggttactgtgaactcaagcgatttgggaaggctttctgaggcagcacagggttgcagctcaaggctgaaggcaatctaacaggatacagtggggggccaagtgcggtggctcatgcctgtaatcccagcactttcaaactccaaggcaggaggactgcttgggcccaggatcgctggagaccagcctgggcaacataggaagatcctgactctatttattttttaaataataggccgggcacagtggctcacatctataatctcaggactttgggaggccaaggcaggcggatcacctgaggtcaggagttcaagaccagccaggccagcatggtgaaaccccatctctactaaaagtacaaaaaattgctgggcaggacggcttacgcctgtaatcccagcactttgggaggctgaggtgggcggatcacttggggtcaaaagttcaagaccagcctggccaacatggcaaaactccatctctactaaaaataaaaaaatcagctgagcacagtggctcatgcctgtaatcccagcactttgggaggccaaggcaggcagataacctgaggtcaggagttcgagaccagcctgaccaacatggagaaacatcatctctactaaaaatacaaaaaacaaacaaacaaaaaattaggcgggcgtggtggtgggtgcctgtaatgccagctactcgggaggctaaggcaggagaattgcttgaatccgggagatggaggtttgcagtgagctgaaatcatgctactgcgctccagcctgggcgacagagcaagacgttgtctcaaaaaaaaaaaaaaattagccgagtgtggtggcatgcatctgtagtcccagctatttgggaggctgaggcaggagaatcgcttgaacccgggaggtggaggttgcagtgagccgagatcacgtcactgcactccagcctgggcaacagagtgagaatccatctcataaataataaaaataaaaatacaactacaaaaaattagccaggtgtggtggtgcatgcctgtagttccagctactcgggaggctgaggaaggagaattgcttgaaccttgtcgacggaatttgcagtgagccgagatcttgcccctgtactccagcctgggtgacaagagcaaaactctgtctcgaaaaaaaaaaaaaaaaaaaaaaggatacagtgtggtggggtgaggaagacagggaagactggggacagggacactagacagaggtctcctgaaaattagtgcccataacaggtgtttggtagacaggtctcagccctcagacaaacccatttccaaagatgaaggccagagaatgagaataatgatttatcgttctggccgggtgtgatggctcatgcctgtaatcccagcgctgtgggaggcgtggccggcagatcacctgaggtcaggagttcaagaccagcctggccaacatggtgaaacttggtctctactaaaaatacaaaaattagccaggcatggtggtgggcgcctgcaatcccagctacccagaaggctgagtcagaagaatcacttgaacccgggaggtggaggttgcagtgagccgagatcgtgccactgcactccagcctgggtgacagagtgagactcaggaaaaaaaaaaaaaagacttggccgagcccagtggctcacacctgtaatcccagcactttgggaggctgaggcgggtggatcacgaggtcaagagatcgagaccatcctggctaacacggtgaaaccccatctctactaaaaaatacaaaaaattagccgggcgtggtggtgggcacctgtagtcccagctactcgggaggctgaggcagaatggcgtgaacctggtaggcagagcttgcagtgagctgagatcacgccactgcactccagcctgggtgacagagcaagactccatctcaaaaataaataaataaataaataaataaataataataataataataaagacttgtgatcctctccctctccctctccctctccgtctccctctccctctccctctccctccctctccgtctccgtctccgtctccgtctccctctccctctccccacggtctccctctcatgcggagccgaagctggactgtactgctgccatctcggctcactgcaacctccctgcctgattctcctgcctcagcctgccgagtgcctgcgattgcaggcacgcgccgccacgcctgactggttttggtggagacggggtttcgctgtgttggccgggccggtctccagcccctaaccgcgagtgatccgccaacctcggcctcccgaggtgccgggattgcagacggagtctggttcactcagtgctcaatggtgcccaggctggagtgcagtggcgtgatctcggctcactacaacctccacctcccagccgcctgccttggcctcccaaagtgccgagattgcagcctctgcccggccgccaccccgtctgggaagtgaggagtgtctctgcctggccgcccatcgtctgggatgtgaggagcccctctgcccggccgcccagtctgggaagtgaggagcgtctccgcccggccgccatcccatctaggaagtgaggagcgcctcttcccagccgccatcacatctaggaagtgaggagcgtctctgcccggccgcccatcgtctgagatgtggggagcgcctctgccccaccgccccatctgggatgtgaggagcgcctctgcccggccgagaccccgtctgggaggtgaggagcgtctctgcccggccgccccgtctgagaagtgaggagaccctctgcctggcaaccaccccgtctgagaagtgaggagcccctccgcccggcagctgccccgtctgagaagtgaggagcctctccgcccagcagccaccccatctgggaagtgaggagcatctccgcccggcagccaccctgtccgggagggaggtgagggggggtcagccccccgcccggccagccgccccatccgggagggaggtggggggtcagccccccgcccggccagccgtgccatccaggagggaggtgggggggtcagccccccgcccggccagccgcccggtccgggaggtgaggggcgcctctgcccggccgcccctactgggaagtgaggagcccctctgcctggccagccgccccgtccgggagggaggtggggggtcagccccccgaccggccagccgccccgtccgggagggaggtgggggggtcagccccccgcccggccagccgccccgcccaggaggtgaggggcgcctctgcccggccgcccctactgggaagtgaggagcccctctgcccggccaccaccccgtctgggaggtgtgcccaacagctcattgagaacgggccaggatgacaatggcggctttgtggaatagaaaggcgggaaaggtggggaaaagattgagaaatcggatggttgccgtgtctgtgtagaaagaagtagacatgggagacttttcattttgttctgcactaagaaaaattcctctgccttgggatcctgttgatctgtgaccttacccccaaccctgtgctctctgaaacatgtgctgtgtccactcagggttaaatggattaagggcggtgcaagatgtgctttgttaaacagatgcttgaaggcagcatgctcgttaagagtcatcaccaatccctaatctcaagtaatcagggacacaaacactgcggaaggccgcagggtcctctgcctaggaaaaccagagacctttgttcacttgtttatctgctgaccttccctccactattgtcccatgaccctgccaaatccccctctgtgagaaacacccaagaattatcaataaaaaaataaatttaaaaaaaaaaaaaaaaaaaaaaagacttgtggttctgcactttaggcaccatgttggtcaggctggtctcaaaatactcacatttgtgagtaagaagaggttgtaaggatgttcactgtggcattgtttgtaagggtgagatatgggaacaacagaaatatccaacaacaggatatagattaactaaaaggagatatattcagtctatgggatattatatccatctaaagaatgaaggtgatgtggaaagagctccatgatataccaggtatgatgaaaaaatgtgagttccaggacactttttatggtttgctaccatttatgaaaaacaaagctacatgaatatgttcattagtgtacataaaaatataaaaggccatagtccaaaattatattgtgattatctctagggacaaaagtaggaggagagtaaaagaggatttttacttttgactctctatagctctatactgtgttttgtttttttttttttttgagacggagtgttgctccgtcgcccaggctggagtgcagtggcacggtctcagctcactgcaaactccgcctcccgggatcacgccattctcctgcctcagcctcctgagtagctgagactacaggtgccagccaccacacccggctaattttttgtatttttagtagagacagggtttcaccgtgttagccaggatggtctcgatctcctgacctcgtgatccgcccatcttggcctcccaaagtgctgggattacaggcgtgagccaccacacctggccgctctgtactgtttttgaaagtttaaaatgaaaatttattcctgctggtgaaatggctcacacctgtaatcctaacactctgggaggctgaggcgggcagatcgcttgagctcgggaatttgaaaccagcctggccagcatggcaaaaccccatctctacaaataataataataataatacaaaaaatagccaggcatggtggtgcatgtctgtagtcccagctactccggaggctgatacgggaggatcacttaagcccgggaggcggaggttgcagtaagctgagatcatgccactgcactccagtgtgggcaacagagcaaaagcctgtctcaaaaaaaaaaaaaaaaaaaaaaagtattcctatataaaaagactttggctgagtacagtggctcatgtctgtaatccagcactttggggagccaaggcgggtggatcacgaggtcaggagttcaagaccaccagcctggccaaaacagtgaaaccccatctctactaaaaattcaaaaattagctgggcatggtggcgcttgcctgtgcctgtaatcccagctactcgggaggctgaggcaggagaatcacttgaacctgggaggcagaggttgcagtgagccaagattctgcactgcactccagcctaggtgacagagcgagactccgtctcaaaaaaacaaacaaaagacttcaagcccaggcacagggactcactcctgtaatcctaacactttgggagactgaggtgggtggatcacctaaggtcaggagtttgagaccagcctgtccaacatggtgaaaccctgtctctactaaaaatacaaaaaattagctgggtgtggtggcgggcacttgtaatcccagttacttgggaggctgaggcaggagaatcacttgaacccaggaagtggaggttgcggtgagccaagaccacgccattgcactccagcctgggcaaaaagattgaaactctgtctcaaaagcaaaacaaaacaaaaaaaccctcaaattcttatcaagtcatgacagcaaagaaggcaagaatcacaaaaacacgaggctcagaaaatttcagttgaaaatctctggaatattctggttcaagcccccagaacctcaggagcacaatacagggcaaaggaaagaaccttcactaagatataggaaagtgctgaacagaagcaaacaaattaaacccccaacttctaatacacttgaactgaacctgggcatggtggcttatacctgtaatcctagcactttgggaggccaaggcaggaggacagcttgagctaggagtttgagactagcctgggtaacatagagagactctatctctacacacaaaaaacattagccaggcagggtggtgcacacctgtggtcccagctacttgggggttgaggcgggaggatcacttgagcctaggagtttgaggctgaagtgtgctatgattgcaccactgtattccagcttgggcaacagagcaagaccctgtcaaaaaaaaaaaaatgctccatttaaaaaaattattagattcaggccgggtacggtggctcacgcctgtaatcccagcactatgggaggctgaggcagacagatcatgaggtcaagggatcatgaccatcttggccaacatggtctctactaaaaataaaaaaattagctgggcgtggtggtgcgtgcctgtaatcccagctactcgggaagctgagtaggagaatcacttgaactcggatggcagaggttacagtgagctaagattgcaccactgcacttcagcctggcgacagagaaagattctgtctcaaaaaaaaaaaaaaaaaaagtattagattcaagggacattgtcaaattgctataaaaggttccaaatgcttattctcaatttctgtccttattatagagaggacaagaggacattctgaggacataacccaagatgcacactgaactttccagctgtgctgcaccacagcacactactattcaactatactatgttcacctgttacgtgggctccctccagagacagagtcccacccacgtctggctcattaccaaacgctctggcttggcccacggagcatgcttcaatgactccatggactaaaggaatgttcaagttaatgtctctggccacagctgctaagagaggttactcaccatttggaaccagaaggaggcttttcacgatgcttctgagggagccaagactgatctgattggtggtggcaaattcagagagctgagccagaaatctttccacctgcagagagagaacagtgaaaacccgggccttcactttctaagcatctcagggagcacggacccactccctaacacagaatgttttatttacctcttttggctcagttaggaagtggaaaagcacctctgtcagggctgagaactgctgtgaagaaaacaacacagaacatcagtacaatttctactactgggtcagcatgccccaccccaggcaactgcatagccttgagagggaagaacagtaacagccaggtgttatgcctgttctgatcatcctatagttacaaatgttcacaatacccaccaccagtgtcaatatacctgtgtcgctacatcatctgaaaaacacgtttattgggatacttagcagacatgtattgagagactgtaagcatatgcactcagatgcacacatatatctctaggacacagacacacacagacagacatacacacacacacacacacacacgcacgcacaagggggaaatcatcagaaaattaaaagcggttaccactttggatgatttttattttcttctgttttacctatccatattttctttcttttctttttttttctttccctgagacagggtctctctgtcacccaggctggaatgcagtgatgcaatctcggctcactgcaacctctgcctcctgggctcaagcaatcctcccacctcagcctccagagtagctgggactacaggcacatgccaccatacccgactaattttttttttaatgtagagacagggtctcactttgttgcccaggatggtctcaaactcctgggctcaagtgatctacccacgtcagcctcccaaagtgctggaattataggcataagccatgcacctggcctcatattttcttgggttccccccacccataaacatctcgttacttgtgtaagacaacaataaactgtaacactttattatacacctagaacagactcttacagttttgtgtgtcttaatcttttctctttactggtaatgtgttgttaggaactgaatgtttgtgtctccccaaaattcatatattgaagccctaacttccattgtgacaatatttgaagacagggcctgttagatgataaaggttaaatgaggtcataagagtgagatgctagccccatagggctgggggcgcttattttgattttttttttttttttttttagatggagtctcactctgttgcccaggctggagtgcagtggtgtgatgttggctcactgcaacctccaccttctgagttcaagcaattctcctgcctcagcctcccgagcagctgggattacaggtgcctgccaccacacctggataatttttgtatttttagtagagacgggtttcaccatattggccaggctggtctcgaactcctcacctcaagtgatccacctgcctcagcctcccaaagtgctgggattataggtatgacccaccgtgcccagcctagggctggggcccttataagaagaggaagaggccaggtgcagtggctcacgcctgtaatcccagcattttgggagaccaagatgggaggattgcttgaggctgtgagtttgagatctgcctgggcaacacagcaagaccccacctcttaaaaaaaaaaaaaaggaaggagggagtcatctacaagccaggaatcacactggctggcacttgatcttgtacttccgagcaagcagaactgttagaaataaatgtctgggctgggcatagtggctcacacctgtaatcccagcactttgggaggctgaagtgagtggatcacgaggtcaggagtttgagaccagcctggccagcatagtgaaaccccgtctctactaaaacaaaaaacaaaaaaaaattagccaggcgtggtggcgtgtacttgtaatcccagctacttgggaggctgtggcaggagactcacttgaatccaggaggcaggggttgcagtgagctgtgatcatgccactgtacaccagcctggacgacagattgagactctgtctcaaaaaaaagaaagaaagaaatgtctgctgttggagccaaccagtctatgatattttgccttaacaaaataccagctgcccaggtattttgttatggcagcctgagctgactgagacacagatcattactttatcatgtccctccctggcctgagctgactgagacacagatcattactttctcatgtccctccctggcctgagctgactgagacacagatcattactttctcatgtccctccctgtgaacagtgtgtatgggctggacgcggtggctcacgcatgtaatcccagcactttcagaggctgaggttggcggatcatttgaggtcgggagttcaagaccagcctgaccaacatggtgaaaccccgtctctactaagaatacaaaaattagccaggcgtggtggtgcgtgcctgtaatcctagctactcaggaggctgaggcagaagaattgcttgaacctgggaggcggaggttgcagtgagtggagatcatgccactgcactccagcctgggtgacagagcgagactccgtttcaaaaaacaacaacaacaacaacaacaacaaaaagcccactgtgtatggcatagtggggaaaaccaggatgccagggtttaaaagacccagttcaatcagtgttctccgttgactactcttgtgaatttggtcaagccgtttagcatctgtgtcccagtccccacgaggaaaacaaaggtaagaatacacagcttccaatactaacagtaacacatgcagagcctctagcacagagccaggctggacgctaaacaaatggtagctacagttagagtcataattagagtcactataccatttgatccaccttctagaagcaatatataaaaaaagaaaaagattataggcagatacttcagcttaaaacccccaaagttgtatgtgtagtatgttaaatgcacctatcccttctgctatgacacattaaactctacacatctgtcaggactctgtattattttattcaaaaatgtattctattttaaaagaaaacgaaactgggtgtggtggctcatgcctgtaatcccagcactctgggaggccaaagtgagaggattgcttgaggccaggagttcgagaccagcttgggcaatctgcataaaaaaatttaaaaattagccaggcaaggtggcatgctcctgtagtcctagctactcaggaggctgaggcaggaggattgcttcagcccaggcattccaagctgcagtgagtcatgatcacaccactgaactccagcctgagtgacagaacaagatcctagctcaaaaaataaaaataaaaaataaaaataaattagtcaagcatggtggtatgcacctgtagttctagctactctggaggctgaggtggaaggattgcttgagcccaggagcttgaggctgcagcaaactatgattgcgccactgcaatccagcctgagcgacagtgcaagaatgtgttattgatccctcgtccctatctctcccttcccaagccctccttatcctccaaagccctgccaagaaaccatgacactcccaacaagaaagggacctacccagattctcaacttctgaggctccctggggccacctacaattttcaactctgataaggaacacaaacatgtcttagaagagaagtttccttatatggcattgcagcttcacagcaacttaaatactgtaagtgcacagtatttgctgaataaatctttcctaaacactccccgcaatgctttgcctttgcaattgcataggtgcctccctctggaatgctcacccacccatggctatctatgcatgcatctcaaaatcttaaggattctccccagtaaacttaggaagagatgcacaaggtcattccagactagagaaatgcaaatcagtaaaaccagaatatactatttttcacttatcagatctgcaaacccaaaagtttgactaggacaccagtgctggtgaaagtacaaggaagcagacaggttcctgcatgactgataataggatacactggggtgacctttctaggggcaatttcacaatgtgcatctaacttgtatttttttgaggcagagtctggctctgtcgcccagactggagtgcagtggcgcaatcacggctcgctggagcctccaacctcttgggttcaaagcaatcctcccacctcagtctgctgagtagctgagattacaggcacatgccaccacatccacattgggctaatttttttatattttgtagagacagggtctcacaatgttgccccagctcatctggaactcctgggctcaagcaatcctcctgcctcaccctccctaagaactgggattataggtttgaccaaccacacccaaccggcatcaaatttttaaagtgattatacccctcgacctagtaattccattccatgaagtatatcctttaggtatgttccaaaaagtaaatgttttggcaagtcacagtggctcatgcctgtaatgccagcactttgggaggctgaggcaggaggaccgcttgatcccaggagacaagcattatgttcaggcaacatagtgagagcccatctctacaaatcataataatacatttaaatttaaaaagaaaaaaagaggcctggcaccatggctcaagcctgtaatcccagcactttgggaggcggaggtgggtggatcacgaggtcatgagatctagaccatcctggctaacacggtgaaaccctgtctctaaaccctctactaaaaatacaaaaaaattagccggtcttggaagtgggcgcctgtagtcccagctactcgggaggctgaggcaggagaatggcatgaacctgggaggtggagcttgcagtgagccgagatcgcgccactgcactccagcctgggcgacagagtgagattccatctcaaaaaaaaagaaaaaagaaggtcggacgcggtggctcacatctgtaatcccagcactttggtggctgaggcgggcggatcacctgaggtcaggagtttgagatcagcctggccaacatggcgaaaccccgtctctactaaaaatacaaaaattagctgggcatggtggcgggcgcctgtaatcccagcagaattacttcaacccaggaggcggaggctacagcaagctgagattgtgccactgcactccagcctgggcaacagagtaagactccatctcaaaaaaaaagaatgcagtagatctatttgtattgaagggagaaaataggatacattgctcagtttaaaaaacaacaacaaaacaggccacgcgcggtggctcacgcctgtaatcccagcactttgggaggttgaggcggggggataaccagaggttaggagtttgagaccagcctggccaacttagccaaacaaaccccgtctctactaaaaattcaaaaatggcctggagcggtggctcacgcctgtaatcccagcactttgggaggccgaggcgggcagatcacctgaggtcaggagtttgagaccagcctagctaacatggtgaaaccccatctcgactaaagaaacaaaaaattagccgagtgtggtggcacgtgcctataatcccagctacttgggaggctgaggcagaattgcttgaacctgggaggtggaggttgcagtgagccgagattgcaccattgcactccaacctgggcgacagggcaagactccatctcaaaaaaaaaaaaaaaaaaattagccaggcgtggtggtgtgcgtctataatcccagctactcaggaggctgaggcaggagaattgcttgaacctgggaggcagaggttgcagtgagccgagattgcacgattgcactccagcctgggcggagtggaactccttctcaaaaaaaaaaaagaaggccgggtgcggtggctcacacctgtaatcccaatacttagggaggccgaggcgcgcagatcatgaggtcaggagacagagaccatcctggctacggtgaaaccccatctctactaaaaataaaaaataaaaaaattagccaagcgtggtagggggcgcctatagtcccagctacaggggaggctgaggcaggagaatggtgtgaacctggaaggcagagcttgtggtgagcccagatcacaccactgcactccagcctgggcaacagagcgagactccgtcacaaaaaaaaaaaaaaaaaagtgccgtgcctcacgcttgtaatcccagcactttgggaggccaaggcgggtggatcacaaggtcaggagttcaagaccagcctggccaagatggtgaaaccccgtctctactaaaaatacaaaaattagccgggcatggtggcatgcgcctgtaatcccagctactcgggaggctgaggcagagaattgcttgaacccgggaggtggaggttgcagtgagcccagatcatgccactgcactccagcctgggtgacagagcttgactccgtctcaaaaccaaccaaaaaaaaaccccagcaagatgaagaaaaaatatatacagaatgaaccattttctatatatatataaaaattcaaagccagaaatgggaggatcacttgagcctagatgttcaagatcaccataggcagcatagtaagacctcatctctaaaaaataaaaataaggccaggcacagcggctcacgcctgtaatcccagcacttcgggaggccgaggatggcagatcacctaaggtcaggagttcaagaccatcctggccaacataatgaaaccccatgtctactaaaaatacaaaaattagccaggtgtggtggtagctgtagtcccagctactcgggaggctgaggcaggaggatggcttaaacccaggaggcaaaggttgcagtgagccaagattgtaccattgcagtccagcttgggcaacacagtgagactccatctcaaaaataaaataaaataaaaataagaaaacatgcccaggcacggtggctcatgcctgtaatcctagcactttgcgagtctgaggaaggtggatcacctttggtcaggagttcaagaccagactggcaaacatggtgaaaccccattctactaaaaacataaaaaattagctgggcataatggtgagcacctgtaatcccagctacttgggaggctgaggcaggagaactgcttgaacccgggaggcagaggttgcagtgagccaagattgcgccattgcactccagcctgggcaacagcgcgagactcaaaaaaaaaaaatttttttttaaaggatactcatatatatgctggcaaattaagacttttatttctataaaaataactaagaaactattttttgtttgttttttgagacagagtctctctgtgtcacccaggctggagtgcagtggtgcgatcatggctcactgcaacctccgcctcctgggtacaagtgattatcctcctcagcctcctgagtagctgggattataagcgtgcactaccatgcccggctaatttttgtatttttagtggagacagggtttcaccatgttggccagactggtcttagactgctggcctgaagtgatccacctgcctcggcttcccaaagtggttggattacaggcgtgagccactgtgaccagctataagaaactattaaaatgatttctggagataagaaaaataaacattttatttttaagagatgggggtctcactctttcaggctggagtacagtgggtgatcatcatagctcactgcagcttccaactcctaggctcctgcctcagcctcctgggttgctctgggattacagacatgctgtaccatacctagcttatttcactttgatatctttgtatactgtttgaatttcctgtctattactttcatttccagcttggtaagaggactgtgggccacttgcttgtattatcctttatatttttctgagtttactctcattctaaaatgattaacttaaaatcctgcctattctcagactccacattgcctgggactggccacgggcatcaaagggcacatctatgtgcaatttggtactatctgcttcttcattttatgacctgctgtagaagatcacaacttccccaggacaaaaggccttgaccatcaaatattcctaagtcctaccaggtttagtggctatttggtttatgtaggcattcaggtaaacacccaccgaacgagcaataaatgttaaagacaaggttcacacaatgattcgttttactacttgaggcctacaccttagaattcaaaataaattcagctaacagagtgggtacttggagaagtctgattatccaacaaaagacagagaaatgggccaaacgactcaggtaagttgcttattaggagaaaggtttaaggtttctgtattaacaataaaggtagctgggcctggtggctcacacctgtaatcccagcactttgggaggctgaggccggcggatcacaaggtcaggcgattgagaccatcctggctaacacggtgaaaccccgtctctactaaaaatacaaaaaattagccaggcatggtggcacatgcctgtaatcccagctactcaggagcctgaggcaggagaatcgcttgaacccaggaggcagaggttgcagtgagctgagatcatgccactgcacttcagcctgggtgatacagcgagactctgactcaaacaaacaaacaaacaaacaacaacaacaaaaaaaaccaataaaggtaaaggtttacagtatgtttcaaggttagaaaatgagtcagttcctgggggtgatggctcacacctgtaatcccagcaatttgggaagccacagtgggtatatcacttgagcccgaagttctagaccagcctgggcaacatggcacaaccccatttcttcaaaaattacaaaaattagccagagctgggcaccatggctcatgcctataatcccagcactttaggaggctgaggcaggtggatcacctaaggtcaggagttcgagagtagcctgaccaacatggtgaaaccccgtctctactaaaaatacaaaaaattagccaggcgtagtggcgggcacctgtagtcccagccactctggaggctgaggcaggagaatggtgtgaacccaggaggcagagcttgcagtgagccgagatcgcgccactgcattccagcctgggtgacagagcgagactccatctcaaaaaaaaagaaatatatacatatacatatatataaagtttagctgggtgtgagggagggcacctgtaatctcagctactcgggaggctgaggcaggagaattgcttgaacctgggagacagaggttgcagtgagccgagatcgtgccattgcactccagcctgggcaacagagcaagactccgtctcaaaaaaaaaagataagccaggcacggtggtacatgcctatagtcccagctactagaaaggctgaggtaggaggatcacttgagcctgggaggtcgaggctgcactccagcctgggtgatagaatgagaccctgtctcaaatttaaaaaaacgaaagaaagaaaagaaaatgagtcaactctgggtgtaatggctcacacctataatcccagcactttgggaggctgaggtgggaggatcccttaaggccaggaggcccagaccaacctaggcaacaaacagtgaccgtgttgctataaaaaaaattaaaaaataaaaaattagcctggtgtggtggcacatgcctgtggttccagctactcaagaggctgaggcaggaggactccttgagcccaggagttcaagactgcagtgagccattattgtaacactgctctccagccttggcaacagagtgaggtcctgtcttaaaaaaaaaaaaagaaaatgagtcaagtgctgatctcaaaggaagtggtttgtattttctacgaataccaagctggaggtaattttacagatcatacaatccagtatcttaaaaaaaaaaaaaagaaaaaaactttgttagtagcagaatctttttttattctccaaatggatatcttccagagaacactgatacattaacaagtaaaagctaagctaccaccataggctttgaagccaaacacgtgatcctaaattcctggctccatcacttcctggctgcctgacattatttatttattttcttgagacagggtcgcattttctgacccaggctggagtgcaatgccatggtcatagctcactgcagcctcaaacttctgggcttaagggattctcctgcctcagccacttaagtagctagaactacaggcacataccaccactctcagctaatttttaaaacttttggccaggtacggtggctcacgcctataatcccaacactttgggaggccgaggtgggcaggttacaaggtcaggagttggagaccagcttagccaacatggtgaaacctcatctctattaagaatacaaacatgagccgggcatggtggtgcacgcctgtagtcccagctacttgggaggctgaggcaggagaatcacttgaacctaggaggcggaggttgcagtaagccaagatcatgccattgcactacagcctgggcaatattgagactatctcaaaggaaaaaaaatgttttcctagagatggggtcttgctatgttgctcaggctagtcttgaactcctggcctcaagtgatccccctacctctacctcccaaagtgcttgattacaggcatgagccaccttgcctggctttctgcatgattttatttacttatttatttgaaacagggtctggtctgttctctgggctggagtgcagtggcataatcatagctaaccgcagcctccaatttctgactcaagtgatcctcccacctaagcctctggagtagctgggactacaggtgtgtgccaccatgcctggctaattttttatcttattgtagagatggagtcttgctacgttgcttaggctagtcttgaactcctgtctacatgactttaaacaggtcaatttatttctctgaaccatctttcttaactgtaaaatgggaataataatagtgccttccttttagagttgttatgcatacatttaaaatggtgcctggccacatggtgcatgctcaatatattaatatcgtataatagctatgttcatttcactgctctgtgattcagtttcttcgtctgtaaaatgtgaataataataagtggctgggtgcagtggctcatgcctgtaattccatcaccttgggaggccaagatggatcaccagagaccatgagttcaagacaagcctagacaacatagggagaccctgtctcaatttaaaataataacagcaactacctataaaagtgattgcaaggactcaattagttaacatacataagctgggcgcggtgtctcacgcctgtaatcccagcactttgggaggctgaggcgggcggatcacgaggtcaggagataaagaccatcctcactaaagcggtgaaaccccatctctactaaaaatacaaaaaattagcagggagtagtggcgggtgcctgtactcccagctactcggaaggctgaggcaggagaatggcgtgaacccgggaggtggagcttgcagtgagtcgagattgcaccactgtactccagcctcggtgacagagcaaggctctgtatcaaaaaaaaaaaaaaaaaaaatacataaaagcacttagatccctattgtccagtggccacttgccacataagcgcttgaaaagggctaatctgaccaggggtggtggctcactcctgtaatcccagcactttggggggccaaggtgggtggatcacttgaggtcaggagttcgagactaccctgaccaacatggcgaaagcccatctctactaaaaatacaagaaaaaattagatgggcatggtggtgaacacctgtaatctcagctacttgagtggctgcagcatgagactcacttgaaccctgtaggcggaggtttcagtgagccgagatcacatccccgcactctagcctgggcaacaaagcgagactgtctttaaaaagaaaagggctggccggatgcggtggctcacacctgtaatcccaaaactttgggaggccgaggtgggcagatcatgaagtcaggagatcgagaccatcctggctaacacggtgaaaccccatctctattaaaaatataaaaaatcagccgggcatggtcgcaggcagctgtagtcccagctacttgggaggctgaggcaggaaaatggcgtgaacccgggaggcggagcttgcagtgagccgagatcacgccactgcactccagcctgggcaacagggccagacactgtctcaaaaaaaaaaagaaaagggctaaactactttaagatgtgccgtaagtgtaaaacaccagatttagaaaactttgtaccaaaaagtaaaatgtcattgatatttgtatatgggtaagatattgaaaaatattttgatattgtggatttaagcatgcatggcattttgatcaatgatggaccatatataaaatgatggtcccataacattataatggaggtaaaagatcccctgttacctagtgattgtcacagaaatccgcgcccagccatgtttgtgttttaagctatgtgttactacaaaagtgccaaaaagtttaacaaaaccagcctgggcaacatggcaaaactctgtctttacaaaaaatacaaaaattagccaggtatggtggcgcgtgcctatagtcccagctatttgggaggctgaggtggaaggattgcttgaacccaggagatcaaggctacagtgagcaatgggtgacagagcgagaccctgcctcaaaaaaaaaaaaaaaaggtaagcattcatgaagtaaaaagttacagttggcagggtgcatggcttacgcctgtaatcccagcactttgggaggttgaggcaggcagatcacttgaggtcaggagttcgtgaccagcctggccaacatggtgaaacgctgtctctactaaaaatacaaaaattagccaggcatggtggtgcacgcctgtagtcccagctacttgggagcctgaggcaaaagaatcacttgagcccaggaggtgaagtttgcagtgagccaagatcacgccactgcactccagcctgggtgacagaggaagactccgtctaaaacaaacaaacaaacaaaaaaaaactgacagtaggctaaggtcaacttatcaaaaacagaaaaaaaaaaatttttttttagggatgggggtctcactatgctgcccaggctggagtgcaatggctattcacaggtggaatcaccatgcactacagccttgaaatcctgggctcaagtgatcctcctgtctcagcctcccaagtagctgggactactgtggtagctgtgccaccgtacccaactagaaagttgtttttttttttttgagatgaagtctcactctattgcccaggctggaatgcagtggtgcaatcgcagcttactgcaacctccacctctcaggttcaggcgattctcctgccttagcctccagagtagccgggactacaagtgcccgccactacacccagctaatttttgtatttttagtagagacagggtttcatcatgttggccaggatggtctcgatctcctgaccttgtgatccgcccaccttggcctcccaaagtcctagggtaggtgtgagccaccgtgcccggcctattttttatcttttatactgtatttgtactgtaccttttctatttagatttgtctaaacacacaaatatttaccattatagtccagttgcctatggtattcagtacagtcacatgctgtataggtttgtagcctaggagcaatgcgctataccatatatcctagggtgcagtaggtttgtgtaaataaactctaggatgcttgcataagataaactcagggctgggcacagtggctcacgcctgtaatcccaacactctgggaggctgaggtgggcagatcacctgaggtcaggtgttcaagaccagcctggccaacatggtcaaaccccatctctactaaaaatacaaaaattagctgggcatggtggcgtgtgcctgtagtcccagttactcgggagactgagacagagaactggttgaacctgggaggcggaggttgcagtgacccgagatcgcgccactgcactccagcctgggtgacagaatgagactacgtctcaaaaaaaaaaaattaatttccatttctatttaatttttaaatgtggctactacaaaatgcaaagttagaaatgtggcttgcaaatttttctattgcatagctcaagcttagaaccttcctgtcgttacaagttctaagtttggtttttatctcgcaagcagcactactgtgtgggaagttgtggggggtatggagatgaaagaagaggggcgctacctcctgggaagtgacaacctagcgggggaaatagatgtatcttcccagtgggggtgagaagtgtcattctcacctatttcagcagccttggtggtatgaaaaggcatcccaaccagcacagaagcaggatgcctccaagactgccttggttggcacctgcagcctgaagggggagaaaaaggctttgctagctcccctaccatcgaggatgaagacccccactgtacacagtgtataaggtttctttccatgtgaatcccagtgactctccttaactgggtggaggtggaaggtgtcatcagccttgtcccagatcgagcccctcaggcccacagagccccagtggggcctggctattactgacactcatgtcacactgagatgtaagacggcagcccaggccaagcttccccgggccccctcagattctcgggccctcccactcccctcaggcttcctcggcctccctgccaaacatctatctccctttggaccccactgctccccaaaactccccacgcccttagtctgttccttcagttccccaaactccttcagcctcatctagactcccctccgtccctcttctaggaccccaaaagctctcctcggccccaggaccccgcagaggtcccgtagtcccatctctgagaccccacaaagcctttcggacccctcaggtggcccttaggcctccggagatcccttggctccccacactctcctcagaccccagctcaccttagcctcgccccgaacccacctcacacaccccaaacgcccacaagacgccgctctgtctagtctctcccaactcccgcgcacccccggacgtcccccccaccccaggcccggatcctggaatcacctgggccccgcgccccacgccccgccgccgggcccacctgcgcgcccagctggttcagctgctgcatgtcgccgcccacggcctccggcaccgggtcctcagtgcagtgcaggcggcccatggcgcgcgccccagccccgcaggttccaccgccgccgccgccctgctcagcttcctcctccgctgccgctgccaccgctgccggcctctccgcgcatccacaaccgcactttcgccacggccgtcgcagcgcactcctcccccggccgccctgggctgtccggagccggggagccctcgcagggccgcggacacgcgcggccgccgggctccggggaggggcaggggcggcgccggcaccggcagacgcgaggtttcctgccagctctcccgctgagtgacctttgggtacggcgcttggcctctctgaacctcagtttcaccatctgagaaaatgatggctggggtagctccttaaatgagttaagcctccagaaatgtttaacgcagagaccggcacacaagaggtcttcaatcaatggctagctgctattatcatcatcactgttactatgcactccagagatatttatggcagcctactcgatgccagacactggggacagggaagggaacaaagcaggccagagtgtctctcggagagctgacatcagagtagagactaggtctcaaccttggaagggcatcagcatcaccccagcatcacctggtattgccgggccccgcccccagaggatctgattcgaaaggccagggtggagcctgagaatttgcatttccaataagcacccagggactacactttgagaccttctggagtggaagaaactgacttaccaaagtttcctcaaaatagtgcgagggctttgactgtgcggggcagggagggtggtggtgaggtgggtgaggggaggttactgagaccgtgatcatcactgcagcccctcaaacactctaacccccatgccctctcttcccaggggctcctcacagttcccaggtgaatattaccctaatccccactggaaacatgagaaaatagagacatgctacccagaatctaggaactgaacgccaagcctaagggcttcacctagcccctaagtccagccttgagggtaaagaggtaatgccgagaaacctggagcagggaaatgtggggggtttggctggccttcctcaccagccctcctcctctcctctaccctttcctgaaaatcccttctgtaaaagtataaacaaaatgtcttctacccggcccggcgcggtggctcactcctgtaatcccagcactttgggaggctgaggcgggcggatcacttgaggtcaggagtttgagaccagcctcaacatggagaaactccgtctctactaaaaatacaaaattagccgggcgtagtggtgcatgtctgtaatctcagctactcgggaggctgaggcaggagaattccctgaacccgggaggcataggttgcggtaagccgagatcgcgccattgcactccagcctgggcaacaagagcgaaactccgtctcaaagaaaaaacaaaaaagtcttctacccaaaggccaagcccatccccttcagtcattatatcattcatacattcattcaacaaatattgagtggcacatgcctgtggtcccagctactcggaggctgaggcaagaggatcacttgagatcttgagatcgagactgcagtgaacccagatggcgccactgcactccagcctgggcgacagagcaagaccacatctccataaaaaaaaaagaaggtctgctgtgaggcagataccatgacatgatagggggtggggattccacagtgacacaaccagatgaaccagatgcagtgcctggcctctgagaagtcagaattgacccagggggcagacgcaagtgtgtgtgaaagtattaagggatgccaaaaagtaggaggtgctttgagaatgtgtacaggacacagtccgagtttggagtacctggaagagaataaaccttcgggtgacaaacagacaggaactcagaggccctactcaccgtgcaagaattttttttttttttttttttgagacagattctggctctgtcacccaggctggagtgcagtggcacaatctcggctcactgcaatttctgcttcccgggttctagtgattctccagcctcagcctcccgaatagctgggaatgcaggtggccaccaccaaacccagctaacttttgtcttttttttttttttttggaaacggagttttgctctttttgtccaggctggagtgcaatggcgagatctcggctcactgcaacctccgcctcccgggttcaagtgattctcctgtctcagcctcccaagtagctgggattacaggcatgtgccaccaccccggctaattttgtacttttagtagagacgggtttctccatgttggtcaggctggtcttgaactccccacctcaggtgatccgcctgcctcggcctcccaaagtgctgggtttacaggcgcgagccaccgcacctggcccaacttttgtcttcttactagagatgggttttcaccgcattggccaggctggtctcatactcctgacctcaagtgatccacctgcgtcagcctcccaaagtgctggcattacaggcgtgagccactgcacctggcccggaatttttatttttaaatatttttaaccttgttaaaaaagaagatctgggctgggcgcagtgacgcatgcctgtaatcctagcactctgggaggctgaggccggtggatcacctgaggtccggagttcaagaccagcctagccaacatagtgaaaccctggttctactaaaaatacaaaaattagccgggcatggtggttcatgcctgtaatcccggctactctagaggctgaggcaggaaaatcgcttgaacccagtaggcagagattgcagtgagccgaaatcccaccactgcactccagcctgagcgacagagcaagactctgttcaaaaataaataaataaatagttgggggaaaaaaaaaagaagatccccatcagggcattacatttcttcatatctttaagtgttaaatcaactgtttaggtataaaaaataaaatgaacctgttttaagttttgttttgtttttaacatcctggagaaaaccactggatttcttttcatttctgcttccacagtgactggtgctgagtcacttgataaatactgtatttgtggaacggaattagctcatgtgacagaaaatacagaaaaggaaaggaattcacttgaaactgacacccaatactataggaatatggtgactcttcttttccagtctttttttttttttttgagacggagtctctctctgtcgcccaggctggagtgcagtggtgctatctcggctcactgcaagctccgcctcccgggttcacgccattctccggcctcagcctcccgagtagctgggactacaggtgcccgctatcacgcttggctaattttttgtatttttagtagagacggggtttcaccgtgttagccaggatggtctccatctcctgacctcgtgattcacccgcctcggcctcccaaagtgctgggattacgggcgtgagccaccgcgcccggcctttttccagtctttttccacatcgcaggtcactggggttgtgtgatttgttttcgttttacatacacaggactctcgcatttcaccaagttatttaataatccctcatactccacgtgtggttccttggaccagcagtgcaggcgttacctggaagcttgttagaaatgctgaatctcaggctgggtgcggtggctctcgcctgtaatcccagcactttgggaggctcgaggcgggcggatcacaaggtcaagagattgagaccatcctggccaacatggtgaaaccccgtctctactagaaatacaaaaattggccgggcgtcatggcaagcgcctgtagtcccagctactagggaggctgaggtaggagaatagcttgaacccgggaggcggaagttgcagtgggccgagatcgggccactacactctagcctgatgacagagtgagactatatctcacaaaaaaaaaaaaaaaagaaagaaagaaagaaaaagaaatgctgaatctcattccagccctttgggaggccgaagcaggcagatcacctgaggtcgggagttcgagaccagcctggccaacgtggagaaatcctgtctctactaaaaatacaaaaattagccaggtgtggtggcacatgcctgcaatcccagctattccgcaggctgaggcaggagaatcgcttgaatttgggaggtggaggttgcagtgagcttagatcactccactgcacacaagcttgggtgacagagtgagactttgtctcaaaaacaaatgaataaataaaataaataccgaatctcaggtctactagacctgctgattcaggatctgaattttaacaagattcccaagtgatttgtgggcacattaaagtttgaagtgcaaataataacaaccactttaagtgctcactttgtgcaggactttattttaagcatttgaatacacaccgtgtataatgataataatactttgcattgtctactgattgtcgctcatattactttttcttttttgtgtgtgctgaaacccaggaatgaaccattatttctattttaatgtttaccacaatgtgttattgctgtcgtttatacatctgtctcctccacttactaattattttgtctcaggcaaattactaacctttcagtgcttctatttctgtttttatttataaaatggaaatgataatataaccttcttggaaagatgaaacaagacaatgcttataaagcatttagcacagcaactggactatggtaagagctcagtaactgcttggtattattatcatttcaatttttcaatcttataaaaagaatatggcaataaacattcctgtacacaattcttttccacatctgattatttctttaggaaaaatttctaggaaggcaaggaatattatgttcagtccttctgggctctaaatgtcatggggatggggtagagatgaggatgtctaatggataccacaaaaagtagttataaagaatgaataggctgggcgcggtggctcacacctgtaatcccagcactttgggaggccaaggcgggcagatcacctgaggtcaggagttctagaccagcctgaccaatatggaaaaacaccgtctctactaaaaatacaaaaaattagccgggcctggtggtgcatgcctgtaatcccagttactcaggaggctgaggcagaagagttgcttgaacccaggaagcggaggttgtggtgagctgagatcacgccattgcactccagccttggcaacaagagcgaaactccatctcaaaaaaaaaaaaaaaaaaaaaaaaacagagagagagagagagaatgaatgaacaagggccgggggcggtggctcacatctgtaatcctagcactttgggaggccgaggcaagtggatcacttgaggtcaggagttcaagaccagcctggccaacatggtgaacctccaactctactaaaaatacaaaaattagctgggcatggtggcaggtgcctgtaatcccagctacttgggaggttgaggcaagagaatagcttgaacccaagagaaggaggttgcagtgagccaagattgtgccattgcactccagcctgagcaataagagcaaaactctatctcaaaaaaaaaaaaaaaaaaaaaaaaaaaaaaaaaaaaggccggccgaggaggctcatgcctgcaatcccagcactttgggaggctgaggcaggcagatcacaaggtcaggagttggagaccagcctgatcaacatggtgaaacactgtccttactaaaaatacaaaaattagccaggcttgctggtaggcacctgtaatcccagctactcaggaggctgaggcaggagaattgcttgaacccgggaggcagaggttgcagtgagctgagattgcgccactgcactccagcttgggtgacagagtgagactccatttcaattaaaaaaaaaaaaggaagaaaagaaatgacaaatacttcaggtgaaggataccctaaattccctgacttgattattacacattctatgaaagcaacaaaatatcacatataccccataactatgtacaaatattatgtatcaatatatttttttaatatcacaaggacggatgaattttcaaggtaagcagaaactaaaccattacccatgaaccatctctctgaaaacacccagaaattagcatttctgcctgaacaggcacctggtgcagttccctgatgaggctccgggtccaggccctgcccgccttccaacccacatcccctacatcccaaagaggagacatccaagtcctctaaattagcctccaaatctcaaatctcatttttggcttcaatgataaaatgctacctaaacatcgtccaaaaatgctgcataatattctatggagcaagaattaaatgctcataactaatccttgtggttgcctatttagaactctctgacttttctttctcattaagaactttgtaactaacaaaggcaatagataaaaaaagtctttccaattttctccttcacaatccactcttagaggaaggaaggagcagtgattactgttaatgtgataactttgcagcaggaaatgcaggccggagccaggactctcttctagagaacctcctgcccccatttcagccttaatgagggaccctactcccttcattcactttaaaatgtccctgtggagggcaacgaaagtcctcactccctctcccctcccccgcgcctgcaagtgaaaggagttcattaagaagtagtttctcaggcagggaggattcctgctgggagtttcaccaaggggccaggttttccctaggagaaaggtctaacccttcacactctgaaatgccaaagggcatttttttttaaattaaacttttaattttgagatcattgtagactcacatacagttttaagaaatgatacagagacattccttgtggcctttacccggtttccctcgatgcacagatcccacagtgtcatcaccaggatattgacattgatacagtcaagacgcagaacatttccatggcagcaacgatctcccatgttgcccaatggcattttaacagaagggacaagtgctagatcctctaacaaaaactagaagaaaatactatgaacattttcaggttaaaaaaaaaaaactgggccgggcatagtggcacatgcctgtaatcccagtactttgggaggccgaggccggcagatcacctgaggtcaggagttcgagaccagcctagccaacatggcgaaaccccgtctctactaaaagtacaaaaattacccagtcgtgggggcgcatgtctgtaatcccacctactccggaggctgaggcaggagaatcgcttgcacccgggaggtggaggttgcagtgagccgagatcacaccattgcactccagcctggacaacaagagcgaaattctgtctcaaaaaaaaaagaaaaaaaaaaagcacgtaacaaaaatgtaaaaatacagttgacctagattcctgacatctatgtcatgaaagtcattgacaaaggaaggctggagaattgctctagattaaaataaataaaaaagacaagataacaatgcaatgtgtaattctggatggaggtaaacaattgctataaaagacattggcacaaaataaatgtacttaacactactgaactctgcacttagaaatagttaagatggttgctctttcctgtagtcccagctatctgataggctgaagtaggaggatcccttgcgtctatgagttctaggcctgggcaacatagtgagaacttgtcctcaaataaataagaataaatagttaaaatggtaaattttatgtgcttttttaaaaccacaattaaaaaaatacattattgtgacaattgaagtctgaacacccactgtagattagataataatattgtatcaatgttcaatttcctgaacttgataaatgtaatttggttatgggaaaatgtctttgttcttaagaaatgcatgctcaaagtactcaaggtaaaagtggataaaatggttcagggaaaaaaatgagccaacacatgtggtaatgtggagatcactgattaatttctaaattggctctgagcatgctggaagccagagggagataagtcaatttcacctctagtttttcatccttacacaggtaaattaatgtagataaatttctcttgttggacttacaggagagttccaattctccaatttttatctaggacatggtgatgaatttgtttacctgttcaaaaatcttccttcaaatggcaggatttctggggtaaagtttaagcctttttaagatcctctggcctaagctccaatggatgtttaagctgtccctctagaaatttgctttttaaagagccctttggcagttcctactttgagggtgtgggtgacaatgtctctaccttttgggaatctcacccctcatttcaaattcatggtaggaatcactttgcctgagaaaatgaggcctggatctctattgtccgctttgtttttctctgcagaaccattataaagtgaatgcctggcctgccctgctttaggccagcaatgcatatcactgctgggtgctgtgaacacaatccggggtgtaatcttgggggactgacctctagaactttcttttctggactatttttatcatctgaaagatagaggagtcgcttcattcattccagtagtaggtatttgttgagcacctactatattccaggtcctgtgttgggtgtcagggacacagcaatgaataagatagatgactgctctgcctctacactgctcaaaatctaatgagggaggcacaccttatatgaagagtcacggaaagacattgcaaaggagaaaaatgctaggaaggagagtggggggctgtcaacaggtgtaatgggggtaaacctgtccggcggagggaaggtaagcagatggagcagttagcctctgtggggccttaggaaaggagcaattgagggggaagccctggggtcttgggcatgtcacccctaccttctccctctactctgcaggtcagcataacttggtaatcatttcctggcctgcagccagggttatcagcatgctgtgtatatggacgtcgtgaagattggaggctgagggccctgaccagaggagataagaacaggtttggacaagaagaatccatcccctctatgtttatctcaaaacggtagagcaggctgagtctggacccagaacaaatccaggaagtagaatccaagaagcagagagatgaatcaagaatgacactaaggttttgggcttcattccatgctacactatctgccccatttgacagtgaaggaagcagacgcccagagaagggaagacacctgtctgaggtcacacagtgggttaataggagaatgagaacagaacctagaccgctgaacttttccccttaaccatcttaccctcctcagaagtcaagcctgagcttccaaaaatgaaggaactcaggtccagggaaactttctgttttgtctgagggtgagggatgagataatgatgagtcagggcttcagggaaacgaacatttactgattacctaatgtgggggtagatgtggtccctgctctcagaaagctcaaagtgtgaatgaattaaagtcaatgtgaccaggcgcggtggctcatgcctaaaatcccagcactttgggaggccgaggcaggcagatcacctgaggtcaggagttcaagaccagcctggtgaacatggtgaaaccccatctcacctaaaaatacaaaaattagccaggtgtggtggtgggcgcctgtaatcccagctactcaggaggctgaggcaggagaatcgcttgaatccagaaggcagaagttgcagtgagctgagatcgcgccactgcactccagcttgggctacagagtgagacttcatctcaaaaaaaataaataaataaaacaacacaaacaacaacaacaacaaaataaagtcaatgttacttcatttcatgaacaacatcaaatttggagggggccatggggtattctccaaggggcaaaaacaggtgatgtccaacagagtgaggcatggcatctctttcaagggccaggatggagaaagaaatcagtggattcagctctggaccccaagtcaaaagccagaaagacaaatcacagattttgatttgcagttaagccttttctcacgagggccactgtacggcatccaataataataactgctactattatgataaataacaagcattcattcatttgatgtcttgtctggagaaacgggataaaacattatccacagacatagagactgttgcagaatgaagggagggctttcctgttttcttttcttttttttttctgatggggtctcactatgttgctcaggctggtcttgaacccctgggctcaaatgatattcctgcctcggcttccaaaagttctaggattacaggcctgagtcaccatgcctggcatcctgtcttctattaactaccactgtgctaggcatggtgcagaatatttcactctgacctgatcacgtcactgaaaaccctgcaaaggctccaattgctgaaagcgtggatgctctgattcctgtcttcttcacctgagtctgccttcctcttcagctgtgtgctctagccatgtgggcctcccctctgttccttgcccaagccgtgctccttgtgcctcaggagcttagcaagtgctgttcccaaatcccagaacacgtttccctcaccccttagcctgctgcttacttaaccattgcatcccctcagatccctgcatgagcattgcttcttttcttttttctttttttttttgagactgtctcgctgtgtcacccaggctggagtgcagtggcaggatcttgactcactgcaacctctgcctcccaggttcaagtgattctcctgcttcagcctcccgagtagctgagattagaggagcatgccaccacgtcctgctgatttttttttttttgagatggagtctcgctgtcacccaggctggagtgcagtggcgtgatcttggctcactgcaacctccgcttcccaagttcaagcaattctcacacctcagcctcccaagtagctgggattacaggcacccaccatcatgcccagctaatttttgtatttgtgtagagatggggtttcaccatgttggccaggcttgtcttgaactcctgacctcaagtgatctgccgcctcagcctcccaaaacgtgacttacttcttcaggaaagttttctcaggccccatgacctaattaattttcattttataataccctgtactcgtcatagcatttaatacaattgtaggccggccaggtgtggtggctcacacctgtaatcccagcactttgggaggccaaggcgggtggatcacaaggtcaggagtttgagaccagcctgatcaacatggagacaccccatctctactaaaaatacaagattagccaggagtggtggcacacgcctgtaatcccagctacttgggaggctgaggcaggagaatcacttgaacccgggaggcagaggttgcggtgagccaagatcgagccactgcactccagcctaggggatagaacaagactctgtctccaaaaaaaaaaaaaaaaaaaaaagtacaattgtaatcttacaactattagtgagataaatttgatgaatgtctgtttcctctactcagttgtagttccgggagggcagtaaaaggactttgcatttttcttctcagctttattccttaccacagtgcctggcacagagttcagtgaattcaataattcaataaatatgcacaccctggccaggcgtggtggctcacgcctataatcccaacactttgggaggcaaaggcgggtggatcacctgaggtcgggagtttgagactagcctgaccaacacagagaaatgttgtctctgctaaaaatacaaagttagccaggcttggtggctcatgcctgtaatcccagctactggggaggctgaggcaggagaatcacttgaatccaggaggcagaggttgaggtgagctgagatcgcgctattgcactccagtctgggcaacaagagcgaaactctgtctcaaaaaaaattaaagaaatatgcacacccctcctccaccaatgacagaaacagggaaggaaattccgtgctggttctgcaggggatagagagagatggatgaactccctccatcccaatcccgtttgggccttgtttatcccacgtgtgaaatggagattagactccttcctacttcacaagggtgttgtgagagtcaaagtgtaatacacataaaatgtttagctcaagtgcctgagcacatggtaggctctcagcagctattatgaaattgcttatttaataataattaatgaatggctgggtgcggtggctcacacctctaatcccagcactttgggaggccgaagcgcatggatccagccgggccaacacggtgaaatctcgtctctactaaaaaatacaaaaattagccaggaatggtggcgggtgcctgtagtcccagctacttgggaggctgaggcaggagaatcgcttgaacctgggaggcggaggttgctatgagctgagatcgcaccactgcactccagcctgggtgacagagcaagactgtctcaataataataataataataataataacaataataaataatgaatatgacctggccaggctctgtgtacttgtctagctaggtacatttaaggaaaatatttcaatgacccgttttggggttaaaaaaaggagaataggagtctgggtgttcctgttgaaagtgaaaggtgaggaacccactttgcaaatgaacgtggcctctaatggcactaccattaggactgaataccttacaatggggttctttcacatacatgggctctgcgaatccccacagtcattctgggaagtaggcatggctattattattattattactccaattagacaagggagatgcttgaggctcgaactccttagcatagcacacacagagtgggggtcacagggagatgggggtcgagtggaggatctagtcccagctctgccagctgtaggccccaggcaaaccacttcacttttctgaacctcattttccttcactataaggagaggcactagatactagatactagaggtggactgggcttgcctgagaggctgggagaccaagggacagacaggactatttggcagacactgaggatggaaggagaacatttatcccacacctgccaagagctgaggcagccaggaaagcagtgcagcatatactcattaataataatatataggccaggcgcagtggctcacacctgtaatcccagcactttgggaagccgaggcgggcggatcatgaggtcaggagatcgagactatcctggccaacatggtgaaaccccctctctactaaagtacaaaaaaaaaattagctcggcgtagtggcacccgcctgtaatcccagctactcgggaggctgaggcaggggaatctcttgaaacggggaggcagaggttgcagtgagccgagatcgcaccactgcactccagctctggtgacggagtgagaccctgtctcaaaaaaaaaaatgtgtatatatatatataaaatttaacaagcatttttatggtattttccatgtggtaggcactgttcaaaatgccttacatgtattaactcataattctcaggaaacccctaggaagtaggaaaaatgatctctattttaaagatgcgctttggtagtctgaggtgggaggatcacttagggtcaggagtttgagaccagcctggccaacatggtgaaaccctgtctccactaaaaagacgaaaattagcccagtgtggtggcccgcgcctgtaattccaactacgcgggaggctgaggaaggaagaagaatcacttgaacctgggaggcagagtttgcagtgagtcaaggtcgcaccactgaactccagcctgggcaacagagtgagactctgtctcaaaaaaataataaaataaaataaaaataaagatgaagaaattgtggcataaagaggtaataacacatgctcacaaaaatttctatcatacattaagtgtctagtatgcagcaggcactgtgctaagcactttacatttgttattaaaaacctgtagctgctctaagaactgaaaggtcatggtataatttaacagaaatgtaagttaactataacatgtgtgtcagcccatcagtgtgttgatttattagcataagagtgtctaggatctatatatgtacatgtggcttttctttataatgttattttattttagagatgggggtcacactgtgttgcccagtctggtctcaaacgcttgggctcaagcgatactcctaccttggcctctcaaagtgctaggattccagacaggagtcaccgtgcctggcccttaattttctgaagaataaatttttatttaatataatatctaatttatagaagagttgtaagtctagttcaaggaactcctggatgtcttttaaaccacattatctatttggttcatattttgtcctctttgctttagcaatctccctgacccatacatatgcatattatttttctgaattatttaagagtaaattggtgatactgtgtctttttttattttttttctttgagacagggccttgctctgtcgcccaggctggagtgcagtggcaggatcatggttcacttgtagcctccatctcccaggctcaagggatcctcccaccttagcctcctgagtagctgggactacaggcacaggctaccatgcctggctaatttttttgatctttagtaaagacaggcaacactttgttgcccaggctgcttctgaacttaactcaaaggatcctcctgccttggcctttcaaagttctggaattacaggcgtgagccacaatgcccggctgcctcttctaaataatttggtgttcatctcctaagagcaaggacactctcttatctatgtgttgttgctttgggtgatgaaacaaatggtctgtaatcacagaatatgtatccccttaatgaatattcctcaccttcatgattataatgattgtgatctgttaaaacacaattttttttttttgagacggagtctcgctctgtcgcccaggctggagtgctggagtgcagtggcacgatatcggctcactgcaagctccgcctcctgggttcacgccattctcctgcctcagcctcctgagtagctgggactacaggcgcctgccactgtgcccggctaattttttgtattttttagtagagacggtgtttcacagtgttagccaggatggtctcaatctcctgacctcgtgatctgcccacattggcctcccagagtgctgggattacaggtgtgagccaccacacccagcctaaaatacaattttaagtaaacattgcaaggtgaccacacagtaggtgctcagtcaaggtttgattacacagctgactcactctgtgtaatcccttccttctctgggcctcagtctcatctgaaatggggcccccagttctccttgcctcacatcctcatgggtggcagtgaggcttaggtgagatgatgaatttgatcaatgcacttttaaaattgtaaagaaaggctggacggcagtagcctgtaatcccatcactttgggaggccaaggcgggtggatcatgaggtcaggagttccagaccagcctggccaatgtggtgaaaacctgtctctagtcaaaaacaaacaaacaaacaaacaaaatttagccaggcatggtggcacatgcctgtaatcccagctactcacgaggctgaggcaggagaattgcttgaacttgggaggcggaagttgcagtgagctgagatcacaccactgcactccagcctgggtggcagagcaagactctgtctcaaaaaaagaactgtaaagaagttctgtgggggccgggcgtggtggctcatgcctgtaatcccagcactttgggaggccgaggtgggcggatcacgaggtcaggagatcgagaccatcctggctaacacggtgaaaccctgtctctactaaaaatacaaaaaaattagccaggcgtggtggtgggcgcctgtggtcccacctaatcgggaggctgaggcaggagaatggtgtgaacccgggaggcggagcttgcagtgagccaaaattgagccattgcacaccagcctgggcaacagaatgagactctgtttcaaaaaaaaaaaaagaagttctatgccctggggagatatcaggccatttttctacccattctcccaacattcctgctccttcccaagtgatgggactgagacaacctgctcacccaaccttctgctttttcttcctgggtttaggtggtcccagaaaatccagccctttggcatctgaactgggcctccccggagttcccactggtggcacaggcatcctctgccacaattcaggacacagggtttagctgtgggttcctagcttagggttcagacacagaggcccaggagccctccccatagacctgtttatttattttatttttatttttatttttatgagatggagtctccctctgttgcccaggctggagtgcagtggagtgatctcggctcactgcaacctccacatcccaggttcaagctattctcctgcctcagcctcccgagtagctgagattacaggcgcccgccactacgcccggctaattttttgtatttttagtagagatggggtttcgccatgttggccaggctggtctcgaactcccgaccttgtgatttgcctgcctcagcctcccaaagtgctgggattacaggcgtgggccaccacgcccagcttcaggcctgtttatatatgctgttttctttccaacaacaatatgccccaggctgggcatggtggctcatgcttgtaatcccagcactttgggaggctgaggtgggtagatcacctgaggtcaggagttccacaccagcctggccaacatggcgaaaccccgtctctactaaaaatacaaaaaattagccgggcatggtggcaggcgcttgtaatccgagctacttgggaggctgaggcaggagactgaacccaggaggcagaggttgcagtgagccgagatcgcgccattgcactcagcctgggtgacagattgagactctgtctcaaaacaaaacaaaacaaaacaaaacaaaacaaaacaaaagatgtgccccagatggtggagacaagctacaggccctctccagagagacccccttcttcctgcaccaatggactggacaccaatttgtatgtttgtgccagaaagccaaggagtcctgctgttcattcacaagaggccctgctgggcgccaggcagggcgctgagctgagcccatttctctctggtatctccctagcctctccccaagctcttaggtagaataagatccagtaagtatagacacttttgcggcatccaaagaattaacccttcactcatttactcacctggtaagagatacagggagaaagctgtggagtaactcagggagctggagcccataaggcaggaaacccatgcccattcattcaacaaacttgtattgagctcctttttgatgcatcccccatccactataagcacttggagacccacacagatgtggtttctgctcccatagtgtgtgtgtgtgtgtgtgtgtgtgtgtgtgtgtgtgtgtgtgtgtgtgtaggggaatgtaaacaggaaaacagatatgcaaaacaatttcagatcgcggtaagtgctaggaacagaatgaaataggataggagtgatggacaggggagacttcaggtggagtcatcgggaaaagcctctccataaagtgaccttctgggagaaaaccgaggggtaagaatctggtcctgcaaagatctgggcaagaaatgtccaggtgtagggaacagcgaggtcaaagtcaccatcacaaggaaacgcttggtgtattgaggagcagcagagaagttggagtgaaggcagagaggggttaaggtagcatataccttgaaaggggaggctcctataggggcttacaggcgatataaatcattcattcattcaacacatatttattgagcatctactgagatcctgtccttagtttactgcgtggagacagaccacaagcaggtaaacaagcaaatatgtaagtcccaggtcagataaattttaggaagtgctgttttccagtggttcaatggtcatcccagggcagaggtggggagacctgctgagggcggcttctccctcagtcagtccatgcctgcagggtctggaacccaggtagccagagacccgctggtcttctttcccctcccctgccctcccctcccttcaagatggctgacaaaggccgggctgggtggaaggaagggaggaagggcgaggcagagggtccaaagcaggatgacaggcaggggcaccgcggcgccccggtggcactgcggctggaggtgggggttaaagcggagactctggtgctgtgtgactacagtgggggccctgccctctctgagcccccgcctccaggcctgtgtgtgtgtctccgttcgggttgaaaggagcccgggaaaaaggccccagaaggagtctggttttggacgtctgaccccacccctcccgcttagggcttctgatcccccagggtgatttcactggcccggggttgggagggcagggggccagggggcggagcccgcggagaggggcggaggggaggctccgagcgatttcaaatttccctcgtccccgcccccccgttccccccgcgcccgggcggggatctgagtggctgcggcgggggcacccccgggcgggggcggggcaagagccgggccggggctacaaggggagtcggcaccgccccctccccacccactcccgctgccccgtccggcccgcgccgcttcctcgcagcagctgctcccggctccgcggccgcagcccgcgtggacgctccgagcgccccccgacggacgggaccggctccctggcggtcgggcgagcgggcggcaacgctgcccggccggcagcgctggggttaagtggcccaagtaaacctagctcggcgatcggcgccggagattcgcgagcccagcgccctgcacggccgccagccggcctcccgccagccagccccgacccgcggctccgccgcccagccgcgccccagccagccctgcggcaggtgagcgccccggggccccggggaggctcggccgccagctgcttcgagggctgctaggggaggggacggcgggggctcccgaagctgccggggagagaccctctccagggacctcccgaggaggggctctcgccgggttggagacccggctgggtttgcggggtgaggaaacgtccacggaccctgcttggggtggaacggggacagcgggtgggacgcgggggacatacgtctgacggggaccggagatactagaggaagggacgcgtctgctgcctccaggagcccgaagaggagagaagcttgctcgcagggagggggacgcgctggcttcccggggtccagactcgaggaggaggaggtgcccgtcgagagcatgaacaggggctttgctcatgggcagggggtgtaattacctggcctctgccttgggaaaagttaaggggcagaggaggtgaggaggggtttctgccatgcaggtgggcgtccgccccttgcaactgggatgtggggtcttcaggcgaggcgctgtcccttcccccaatcccagctttaggaaagagctcgtgagtgtgggcttagactcgcgcgggctggggtgtgcgccgtggagggcgtgaggcagagggcgacctcccggggtgctcctgagctgagccatcaagcgcggggagcagcggggctgccctctgcctgtgcacacctggcccgggaggagccggccggaggggcggcgcctccctgtcccggccacgccgcctaccctggggtcttaccttccattcttagcctaactcccgtgtgcggctggccccacttcccagactcgcacactaaggcctcaaaacctctagcaccagctcctggaagataagcttcccggctcgtggttgcatggggagggtgtattgagctccactttatcggggagaaagtggaagcggagaaagacctaacaagttgtaagactgcgctgcccttgggcccaggcttcccgctggaggatctcacctgtggatggagttccgagcccaggtcttgcccgcgcctccagctttccctgctcccttttcctcccctggtctaggagagaggctcgctgggcctccgtgtttccaccctcccccgaagctgggaagtgtttgaattaaagggaattaagggcagagtatgaactttgagttgcctcctgagttctggatgcggtgggttgtggcagacgggtggcagtttttgggaaacagctgttatctcctctaccaggcctgctggggcttcttgttcacccaccttggaaacgccaggtgcggacttgatttttccagagttgagatgatggtacttagtttatagggttggtatacagtaagcactcaatacatgtttgccattgttggaatcactagctagcacacgggctaagcaagcttccttccttaaggaagcatagttcttagttcatcatgtgtttaaaccctgtctcgccaagttcattgctctccgtgccttaattattacatctgtgaattagcaatagtcctactaatagggttgtgtaaggatgaaaccagtcttatgcgtgaattaacctcttcagcccttgatcttcctcagatgtttaggcataatagcctctaccacattgggcctgggtaaagaggcagtgggatagtgcctgtgtagggtcagcacatggtgagtgttgatgtctgtacttaataacgaatagcccctcattttagggtggccattcctgagatttggggatggagggaggcacccctgccagcctctccttttcctgccttcatgaaggcagctctgaaagcttttctcaatcattgtccacgattagggagttggcaggaagaaccgcctttgttccctttcgaacggagtcttggttttgttttataagggttggggccgtttttaaagccctcccggccacgcatgggggcctactgcaaaggtgtaattgcagaactaagtgagatcctttaccttttcccattggggtggagagtgctgagacaaagggacaaggactggggccagtggcatcctgctcttaaagtcatagacataacccccaccccttgcaaaggatggggggaggggaagacggtagctgggagctgcaggggtctaagggaggagcaagggaggtggggttgagaggctgcttccttcccttcctccagccacgtggggcctgtgatccagaggcgcctgtcgcccctcattattgcagccccatggacctgctgccagtgggggcttgggcaagttcttcaaggaaaacttaccttgggattccttttcctagaccagctcttatgccggctgcctcacctccaggctcagacgccttttccagtttcagctaaatgtgaaacttttcagaggtatgaggttgtgtgctcttcctcacacaccagtccttagcccaggcacatactactaattgagtggagttttttcttttaaatcatgaattttcaggatgatttccagtttcacggaggaccagggctggtgaagtatggaattcatttcatgtgcaggccactcttgtaaaaagagactgagcagatatgtctcccctttgttggggggctcatgttctcactgggacccttttacaggtgatagaactgaggctctggaagatacaggtactattacgtcttggtggtgagcattttctttctctttttttctttcttttttttttttttgagacagttttgctttgtcacccaggctggagtgcagtggtgtgatctcagctcactgcaacctctgcctcccgggttcaagcaattctcctgcctcaaccttccgagtagctgggattacatgcgcacaccaccacgcctggctaatttttgtatttttaattgagacggggtttcatcatgttggcaaggccggtctcaaactcctgacctcaagtgattcacccgcctcggcttcccaaagtgttgggattgtaggcgtggctgttacacccggctgctttttatttatttatttatttattttttctttttttctttttttttttttttgagacggagtctggctctgtctcccaggctggagtgcagtggcgcgatctccgctcactgcaagctccgcccctcgggttcatgccattctcctgcctcagcctcccaagtagctgggactacaggcgccggccaccatgcctggctaattttttttgtatttttagtagagacggggtttcaccgtgttcgccaggatggtctcaatctcctgacctcctgatccacccgccttggcctcccaaagtgctgagattacaggcgtgagccactgtgcctggctatgcttttatatgggtgctgcctcacacccataatcccagcacatgggagactgaggctggaggatcacttaaggccaggagttcaagaccagcctggccaacgtgataaaaccgtgactctacaaaaaatacaaaaagtagccaggcgtgtttgtgcatgcctgtaatccgtgctactgggaggctgaggcacgagaattgcttgaacctaggaggtggaggttgcagtgagctgagatcctgccactgttctccagcctgggcgacagaccgagaccctgtctctatgtgtatatatctacgtagatatagatagcttaagtttttttttttataaggacaaggtcttgctgtgttgccaaggctaaccttgaaagcctgggtccaacgatccttctgcctcagccttccaaaggcttgggattacaggtgtgagctaccacacatggcctctaggtcacttttcactcagattttttcattcattcaaacaaaatagcataggtatgacctctgctctagtttattttttatttacttatttatttatattttgagacagtctcgctctgttgcccaggttggagcgcagtggcggttgctcactgcaacctctgcctcccaggttcaagcaattctcatgcctcaacttcccgagtagctgagactacaggcatgcaccaccatgcctggccaatttttgttttgtaaagatggggtttcacctcattgcccaagctagtctcctgggctcaagcaatctatcctcctcatcctctcaaagtgctgggattatagacatgagccaacacacccaaattcaatttttttttaattatttttattttttgagatggagtttcgctcttgtcgcccaggttggagtgcaatggcgtggtctcggctcactgcaacctttgcttcccgagttcaagtgattctcctgcgtcagcctcctgagtacctgggactacgggcgtggtggtgcatgcccggctaattctgtatttttttagtagagatggggtttctccatgttggtcaggctggtctcgaactcccaacctcaggtgatctgcccacctcagcctccctcccaaagtgctgggattataggcgtgagccaccgtgcctggcccaaattcaatttttaatggggtccttgtcttgttttatgggtacaacatcatttatctgcctgagaatattgtagggtttagtgttccctcgtgttcccgccaatattaagggatactcaattttccagtaccttgccctgtaggtctggctacagggccaggagactggtgaggtctcagtctggtatctgttcctccacttgtcccagtctgtaagctcttgtgtgtgttttttttttaattatttcttttgagacaagtctcgcattgtcacccaggctggagtgcagtggtgcgatcatagctcactgcagccttgaactcctgggctcattccagtatcctcccacttcagtctccaaagtagctgggaccttagtcacgtgccaccacgcccatctaatttttaaaattgtttgtagaaacattaaagtctcactatgttgccccagctggtctcaaactcctcggctcaagcaatcctgcctcagtctccgaaagtgctgggactacaggtgtgagcctgtgcgcccagctgtctcatgttcttgtccagagcctcagcctgcatgtctgaagaagagtggttgtctccagagcagcaggctgagggaggggacttgggagtcaagggtctaactcttcctttggaagaaggcctctctcttagtaggcttttctggattccagcagcatttatgtcctgttgtatgtgtgtgttctggggccagagctggggctggaacccaggctgccactgggccccagctcctgcagaagtgctgatgcctttgtagggcgtttgctgcagccagaacagtgatgggccctggcagcatggcaacatggctcactctgttgcttaggctggagtgcagtggtgcgatcacagcttactgcagccttgaactcctgggtcaagtgatcctctcacctcagtcacctcctgagtagctaggactacaggtgagagccaccaggcttggctaattttaatttttttttttttttttttggagatggagtttcactcttgtcgcccaggctggagtgcaatggcgggatctcggctcaccacaacccccgcttcccgggttcaagcaattctgactcagcctcccgagtagctgggattacaggcatgcaccaccattcccgactaattttgtatttttagtagagatggtgtttctccatgttggtcaggctggtctcgaattccccacctcaggtgatccacccgcctcggcctaccaaagtgctaggattacaggcatgagcctctgtgcctggctaattttaaaattttttatagagataggctctcggtatgttgcccaggctggtctcaaattcctaggctcaagtgtaatcccaaagtgctgggattacaggtgtgagccaccatgcctggtcccttgcctgcctttgattcctaattactatcatggttcctgaagcctagtagaactcatctgaatggatacaggaggctctggagatgggaatggggaggcactaactagggtcccactgagccagctacaggcccccgctcttttgtgaaaagatggttgtgatgaagacttaagtgttcattatattccaggcaagccattttctctgactctgggagttgtttggcaccatgggtaaggaagccctaccccgacaatggcactggaggaagagcctcaagcttaggcactggctttcccaagtccttgggtgaatttgcaaacctcacctgtgtcctcatgttgccctaggatgttacatgctgagctgtaagcaggatgctgaattaggggaattgctcagtactaaatatgattgttactacaaccacaaaactagcaaggagtagaactgcattaaaacactgttgcaaatttttttattttttgagacggagtcttgctctgtcgcccaggctggagtgcagtggcgagatctcggctcactgcaagctctgccttccgggttcacgccattctcctgcctcagcctccctagtagtagctgggactacaggcgcccgccaccttgcccggctaattttttgtatttttagtagagacggggtttcaccatgttcgccaggatggtcttgatctcctgacctcgtgatctgcccgcctcggcctcccaaagtactgggattacaggcgtgagccaccatgccgggcccactgttgcaaatttctttccaaaacctctgccagcacatggctgaacccacagaactggcaggacacacaagatgcgctgggttaagatgctttggtgctctctgtgggttcagctgactgttttacaggcctgcttcttgaccgttggggtgggcagatctgagcccccactaggtaattgtggacagtttttgaaaagtggtttttatgtgagatcatgggcttcttttaaagccatttgtatatatgcagttcccttatctgcaggccttaattttgacatttctgttttccttctcgagatttgttttctgtccctgcagtactgctttttccagaatgtcatataaatggaatcatacattattattatttttgagacagcatctcactctgttgcccaggctggagtgcagtggcacgatttggcacattgcaacttccgcctcctgaattcaagcaggaaccatacattatatagcccttcgagtctgggttcttttacttattgtgagatatttgagatttatttgtgttatgacacgtactagcagttatttcttactttttaaaaaattttttaagacaggtctctggagttcagtactacaatcacagctcactgtagcctcaactccaatgctccagcagtcctcccactgcagcccccactgcccagtagcttcgactacaggcacttgtgcaccactatgctcagttaatttaaaaaaaaattatttttgagacagggtcttgctctgtcactcaggctagagtgcaatggcatgatctcagctcactgcaacctccacctcctgggttcaaacgattcttctgcatcagcctcctgagtagctggaattacaggtgcccgccacctcatcaggctagtttttgtaatttttttttttttctgaggcagagtttttcactcttgttgcctaggctggaatgcaatggtgtgatctcagctcaccgcaacctctgcctcccaggttcaagcgattctcctgcctcagcctcccaagtagctgggattacaggcatgtgccaccaccaccagctaatttttgttggtttgtttgttgttgttgttttagtagagatggggtttctccatgttgatcaggctggtctcgaactcccgacctcaggtgagccgcccaccttggcctcccaaagtgctggaattataggcttgagccaccatgctccgccttactttttttttttttttccttttgagacagagtttcgctctttgcccaggctggagtgcaatggcatgatcttggttcaccacaacctccgcctcccgggttcaagtgattctcttgcctcagcctcctgagtagctgggattacaggcatgtgccaccatgcccggctaattttgtatttttagtggaaacggggtttctccgtgttggtcaggctggtcttgaacccctgacctcgggtgatctgcctgcctcagcctcccaaagtgctgggattacaggcatgagccaccatgcccggcctaaattttttttttgtaatgttggggtctcactttgttgcccaggctgatcttgaactcctgggctcaagcaatcctcctgcctaggcctcccacattgctggggttacaggcatgagccactgtccctggcatctttttttttgctgtgaatataacatttctagcttttctttgtgttgtgatttttaccttttcaatacatagtgtgcaaggacatattttctggttacgatagaaataatttatttgaaagtctatccatgttgaaacaactaaaaatgctgtgcctttatctgttggtagaagaactaagctcccttaaagaaatctagagagcagaagagaacaggaaatgagagaccacaaactaaagggagaaaatgaacttttcaataaggcttgcaggcttgctctagcagttgtagtgattaaaagtagtggcaatggctgggtgcagtggctcacacctgtaatcccagcactttgggaggctgaggtgggcggatcgcctgaggtcaggagttcgagaccagcctggccagcatactgaaaccctatctctactaaaaatacaaaaattagccgggcgtggtggcatgtgcctgtaatcccaaggaagctgaggcaggagaatcacttgaacccaggaggtggaggggttacagtgacccgagatcatgccattgcactccagcctgggcaacagagcaagaccgcatctcaaaaaaaaaaaaaaaaaaggagtggtaaaggataaataccaaacaaaagtgagcctcaaaacatattacatatatatgggaagttcaaataagagatagagttgggatgtattcataggtgtctggctttacttacggggaaaaatattaggtccctatctcataccatatacaaataatcaaataattatgttgattaaacctgagtggcctaattcaaataaatgtttctcagacaggcgagttatgttttccgattgtaaaagttacatgggcttaaggtagttaccccccaaaccttccttctgagtatgaatttttatagttagagaagaaatgctgcagagaaatggcttaaacatcaataattgatgttgcattatgcaggtttcttgttttcactttacataactttgtctaacaataagtactgcactctttgccccctattgtggaagcaggtaatttagtcaaccagtcctcttgaccgtgatttgattgcagtgtttgctatgacaaatgggactgcagcaacccccttgcacagaggccttggcgagagctttgaactgggtggtttctgagcagtagaatcctgtgtaacaggatatagacattaggcattttagatgacacagtgaagattactatcccaaagactgaaccagtatccctgctgtgtaggtatttaggcttaagatgactaaatactgtgtagataggtagacttgagatttaaggcgttcttagttgaagccacaggtgcagcctgctgtgagggaggggccaaggttgagggggtctctttccagaatattgacctcctttgcccccttgggaggggacagggctgttggctctgattttgccaaggggtaggtggccacaggaattgggcatagcagtgcctaggattctgctccaatgctgcccctcattctctgagttaccattgaccactccttggggctgccacacccttcaaggggttctcaaagtggatataggggaaggggctgggtgtttgtgatttctgtataaagggcaaaaagtttagactctaaagttactgtcatatcttttcagatctttatggtcctagttttttttttcctgttacttatctaaaaggtaatgacattattttattccagtgcgttgacaaacatctgagtatattttggtgtcatgcacagtctgcagatagccacttgtctggtttttccctgtttggacacattttttttttttttttttgagatggagtttcgctcttgttgcccaggctagagtgcaatggcacgatcccgagtagctgggattacaggcatgtgccaccaccccggctaattttgtatttttagtagagagcggggtttctccatgttggtcaggctggtcttgaactcccgacctcatgtaatccgccctcctcggcctcccaaagtgctgggatcacagacgtgagccactgtgcctggctttttttttttttgagagggagcctgagcctgtactgttgcccaggctggagtgcagtggctcactgcgacgtccacctcccgggttcaagcgattctcctgcctcagcctcctgagtagctgggactataggtgtgtgccaccacgcctagtttattttttgtatggacacactcttctgataattctgcttactatgccaagggcccagcttctactgtaggatgacagtggtacatgtactcatgacctagaggcactgagcaattccccaaacgcattctgaattgtggagggtgatggggtggatacttcttgattggccctgtggtgtggtgctgtggtgggtagccagatggcacatgagaataagtgacttcaggtatcatgactgtgtcatctatgtaggggtccttggtaccaacttcccagtgaattgggtgggttactttatttcacagattataaaactggggtttgagagaaatattgggctttttttttttttttttataacagggtcttgtgctgtcactgggcctagagtgcagtggcatgacgatagctttactgcagcctcaacttccgaggcttaggtgatcattccccatcagcctccgaggaggtgggactacaggcgagtagctaggactacaggggcaggccgacacattcagctaattttaagaaatattttaatagagaagaggttttgctgtgttgcccaggctggcgttgaactcctgagcccaagctcaagccttggcctcctaaagtggtggtattaacaggcatgagccactgcgcccggcagtggttttttttttttttttttttttttttacgctttcctgtaaatctgatgttttctggaatttagggtaagttccttatcagacagagcaaaagcacagtactgggaccttgtgttctgtcatgtgttctgctgccgccgccagtgtggacagcctgagtctggccccctttcctttggatgtgctgtccctgctgcctggatccttcccgctctctacttcacctaggtgtggtgtccctccctgggcttacttactgcattgttttatggtgtcttttttttcttttttttttgagacggagtctcgctctgtcacctaggctggagtgcagtggtgctatctccgctcactgcaagctctgcctcccaggttcacaccattctcctgcctcagcctccggagtagctgggactacaggtgctcaccaccatgcccggctaattttttgtgtttttagtagagacggggtttcatcatgttagccaggatggtctcgagctcctgacctcgtgatctgcccacgtcggcctcccaaagtgctgggattacagacctgagccaccgcgcctggccttttttttttttttttttttttagattcaagaagtacatgtgcttgtttgttgcatgggtttattacttactggtggggattgggcttctggtgtatccattaccgaaagagtgaacgttgtacctgataggtgatttttcaacccttgctccttcccatcctcccgtctttttggggtctcccatgtcttgtcttgtcttgtcttgtcttttttcttttctattttgagatggagtctcccccttgtcgcccaggctggagtacagtggcacgatctcaacctcactgcaacccccgcctcccgggttcaagtgattatcctgcccagcctcctgagtagctgggattacatgcgcccaccaccacgaccggctaatttttttttgtatttttagtagagactggttacaccatgttggtcaggctggtctcgaactcctggcctcaagtgatcaacccgcttcagcctcccaaagtgctgggattacaagcgtgagccaccgcgcctggcctaatttttttatttttagtagagatggggtttcaccatgttggccaggctggtcttgaactcctgacctcgggtggtccacctgcctcagcctcccgaagtgctgggattacaggcttgagccactgcacctggccctagatttctctaacataggctgtggaggtggaatttttatttattttttctttaaatcaatactctccactgaatgtaggattttagtttttaattttttactgcaccccaggggttggggcagataccaaagtgaccccccttcctgcattgtgaggtttaattaatgcaattaacatttacgaagtgctctgaaacagctctgctgctggtatcagcctggaggaagtgagtgacatcagttctcagcattactgctgggttggggcgagtccctgagcctcctctgagtctaattgggggttgccacctacccctctgtctgccacattgcatttgagtacatctgacctggttcagtcggggcacaggcaccctgctgcactaatgaggaaggcccctcggggagaagcttgtgggtgggcccacccagcactgctgcccactctgaatcacacgctggaccccagcctctgggaaagggtcagagttcacctctcatcacaaggttaggcagccacctcctgtgaagggaaacgctcagctggtatatcatgtcccagccacgaagctcccttcatccctgggatgggtgatgcattcattgttcataacttctgtaattcttgtctgtcttgtctcagttacggcaattccaggcacgtgccctggattgcctgggcatgagatttggcactgccacttctctgggtgacttaactcatctgagtctgttgaaggcagggggataataagacctgccccaggatggggtgggggttaaaggaggtggcagacaggctgggtgcagtggctcacgcctgtaatcccaggccaaggcgagtagatcacctgaggtcaggagtttgagaccagcctggccaacatggtgaaaccacgtctcttctaaaaatacaaaaattagccaggcatggtggtgcaagtctgtaatcccagctactcgggaggctgaggcaggagaatcgcttgaacccgggaggtggaggttgcagtgagccgagatcgcgccactgcactccagcccaggtgacagagacttgatcttaaaaaaagaaaaaaaaaaaaaaatccatggtggtagacagtgttcagcctacagtaagtagggccctgggaactgttagctacttaatgttacagtggcagtgtgggatgatgcagttctaaatccagcatgtctgccactctggataggtcatattagataaagcagttggcttgtgatgggggccatgttatctggaaatgccagccttgaatcatgaagtcagtgagatacatagaaaagaggtgggggagatttgtatccactggtacacacctgatgctaatttaatttctcttgtcctgattctaagaacatgtagttaaatttgtatgttatttactttccctatatattgatcaaggaggtagtatgtcagtctctgtcttggtttctccatctgcaaaacaggaataacagtacttaccacatttaaaggttaaatgagttaagataagtaaagccaaaacagtgcctgacacatagtaacactgaaaaaaagatgaccttattggggggatttttatatatttatatatgtgggaagaaaggcctaggagagaagcttttattcctggattttgagctgtgggttttgaggtctgagaaaggaagcaggaggtgtagggagttggggagggcttccaggctgagagaacacagcagcacatgcctcgaggctagattgtcttggcctgcgtgtagactgaagcggggtgggggaggaactgagctgggcatctttagtcatgggtgcaggttctgaagttggtgtgcgctgtctacacagctgtggctataaggcaatgagggtagttaatttcactacaaacgtagggtcgtgataaaaacagaaggaattttaaatgaaatcacattgaattatgcaacgagaagaaagcatatataagtgctcagcttgctcctgggggacacccaggtagctagtgccatttattgtgggttttcttcctggactgtctctccagtacccacaggtcttgttctaggggcttgaggcttttcctgaatgttgagatatgggttttggaaggtgtgctgcccacacgttgggtaggctggtggccagttggcactgctgaggccctgggggaaggcccagggtggttaatcattgtcagcctgggtctgtctaggaggtgagactcctgtctggcttcttgttgacccagttagggcctgtctgaggaatggggttcaatgttgcctgcgaaacccagcacacattagaaccccaggccctggatgaaggcgaaggaggtcacatccttcactccaggcctctggtctgctaccagctcctggccacaaacaaaccctgtgtgtcctccccccagagcactttggggaggtggaccctcctggagacaccaggtacaccaggtagccccacctcccactctatgccaggcccactaggttacttagttcactgatttggcctgaggtgaaacgcttgaaattaatgattattctgaaccgacaccgcagcagctttcctgggattctgactgctttgtctcataggaactggccataggtcagccagcctgttcttccgggtcagggcttgggagaaaaagggctgagaagcagctgattggtctgattcaggcacgtcccttgtccttggtaggggaaattccttaacaggtgctgatacacactctggatcatgtgaagcacagaaagcctatgtgttatgtatcagcgcacatgtttataatctgaacaatgctgctttaacatgcatattaatcacctaggcatgacttgtgtgtgttaaaatgtcttgtgaaaatcccgcttcaggccgggtgtggtggctcacgcctgtaatcccagcactttggtaggctgaggtgggcagatcacgaggacaagacatcgagaccatcctggccaacatggtgaaacctgtctctactaaaaatacaaaaatcagctgggcgtggtggcgcatgcctgtaatcccagctactcaggaggctgaggcaggagaatcgcttgaacctgggaggcagaggttgcggtgagctgagatcgtgccattgcattccagcctggcggaggtcgcaccactgcactgcagcctggcgacagagggagactctgtctcaaaaaaaaaaaaaatgaaaaccctgcttcaggacatctagcttagtggtggagatttctccagccagctcccacttccaacagttcttccaagcagctctcagttcatggtactgtagcctgcgtggctcctgggccacacagggagtagcagcagaggtccagttgccccatgccatgggcaggtgcagggtctggaattgggagctctcaccacagattgcacctctgcctgggggcgccactgggctcatcagactgagctcacggtgccccctggtgggcgatgccagtggcgccagtgcagcttggagcccgcaatacaaggtgtggcttctagaaggtaccctggtttgagatgctgaggtgggaggatcccttgaggccaggagtttgaggccagcctgggcaacatagccagactctgtttctacaaaaaattagccacacctggtggcacacacctgtgggcccagctggaggatcactgaagccctgggagttgaagcctacagggagccgtgatcacgccactgcactccagcctgggtgaccaagtgagaccctgtctctaagatagatggatggatggatggatggatggatggatggatggacagatagaagataaactgcgaggctagcacgggttgtctggcaggggctggtatgtctccacgatggagcccgaggcagggaggcccggtgcatatggcagcagcttattggggaagcttttcccaggcacggttccaggacacaagggtgtggtgtgagtgacctggagctgtttgtggttcagggatgggggcctggaggtctcattatgcctaggcttttataatatttttgccaaccaaaggtggaacaaaaagcaaaggcaagtgacttggaaaactcggtttcagcggggatttatgccctgaagttttttactcgttctctatctaatcctggccctacctcttagatgggctatatgaccttggagaataacctagtctggatgtcagttttctttttctagaaggtgagctccccagtctccctagggggagatacaggttgttgcatccaacaaaatctgtgtgcccataatgttgcaggcaatgggccagcccagaggttatagcctgccaacccatccgtatggccctggccctgtgtgttagctgatttacctgaccaggaggggcagcagtggggaggccaagtcccagaggtgagggtgaggctacaatggatctggggagtccccctcctggtaactgcccccaggctttctgcctgtgcctccatccttccctccttgggaacttgggactctgagccccagctggtgagggaggaggggagtgagcgacaggccagcagaccaatgggccctggaggatggggtgaggcggggcttgtgctgccatggagaggagagaagcggttctgtgggggaggagggggtgggtgggaagaggacctggagattgaggggaagggagagagcaaacaaaggggtcaggagggaaaataatgcactggcttcctgagcccctgcagaggctgagcagggagagggggccagggccagaggggacagaggctggcggcagacgggccgggacaggcaggtcctaaatggcattgtttgaaggggccggctaattgcacagagcagtctgagcctgagaccccagccctggcctccccactctgtcctgggtgctggcgtctgagccttcgggacagcctgtccacatggaaccaagtcctgagcctccaagcttggtgagggggaggctatggggggcagcctgggtggggtacttgggcaagagcatcaccctaagaatgcatcctggggccttggcctgagaacacagagcccatggcgggggaacactgtccctctcatgtccctgcttccctttcaccccacccattctggcttctcccacaggaaagcatgaagggagacaccaggcatctcaatggagaggaggacgccggcgggagggaagactcgatcctcgtcaacggggcctgcagcgaccagtcctccgactcgcccccaatcctggaggctatccgcaccccggagatcagaggtggctgggcagtggggactggggtggtgtcaggcgctgacatagtgagcggtcactgcagacaactggaggctttggggagagtctctgacaacctccaccacaattccccgggagggaagagagctctagcaaggagggatgcagggtcgagcccttcacacctgcccgcagcccttggcctcccctttgggactctcatctcagctgggactctgagcgtgacacaagggtgatggttccctgtcctctgccagtcatgacaggggtggtctcagcatgggcccttggagagcccttctgcagtgggaccctctccccactcagagctgggctggggttgggagggggaggtctggagtgtgcttcctttccaccctgccctgagcagctccagccagctcacttgggatcccgccccagctgggttggaaagccctgcattgtcctctcagctgtgccatcccatggaacttcctgcgagcgtgaaagggttctatttctgcattgttccccacaatagccacactctacatgggagcacttgagaagcggctgacacagcaggcagtgaattgttcctggaaatgtagttagtggtccctggatgggcagcaccctgctggaaggaatcggagggctccccttggtaacttcagtgttggtttgggtcctgtcacgtgcctggcccagggctctgttgtcttaggaataaaatcagtggagaagatgaacgatactgacggactgagagcaaatccctgtggctgacaatagtgtaggggagatcccaggccacgccacggagaaaagcccctattagcaaggccgttccccagactggtgcctgcccccacaaaacagactcctggctgtttcctctacaggccgaagatcaagctcgcgactctccaagagggaggtgtccagtctgctaagctacacacaggtatggtctctgctctccctttttcagggctcagggactttgtctttggctttcatcacgtgggctgcctgaggcccataaaaactggcatctgcaaatgtatggagggttgccgagctagatgctttctgcatatatttggcattattttttcaatctggacgatcagttacattgctaaatctctaatatggtagtcccctcttatctgtcattttgctttccacgatttcagttgcttgcagtcaactgccgtctgaaagtattaaatggaaaatattaaatggtaaatcccagaaataaacaatttatacattttaaattgagtgccattctggtagcatgatggaatcttgcactgtcctgctccgtcctgcccaggatcagtcctgtctttgtccaacatctctatgcttaggtgctacctgcctgttagtcacttgtagccgtctccgtgatcagatcagttgcagtatcacagtggttgtgttcaagtagtgcttgttttacttaataacggctccaaagtgcaggagtgatgacgctggcaattcagttatgccaaagagaagccatgaagtgtttcctttaagtgaaaaagtgaaagttctcaaaaaggaaagaagaaatcatatgctgaagttgttagatctgtggtaagaacaaatcttccagccgtgaaatcatgaagaaggaaaaataaatgcatgctagttttactgttgcacctcaaactgcaaaagttatggccatgttgtgtgataagtgtgtagttaagatgggaaaggcattaaatttgtaggtggaagacatgaacagaaatatgttctgattgacagcagtgctttgtgccagggagcattgagcctatagcaagggatcccctgacaccaaaccatttacttcaagtaagggatggttacatagattcaagaataggtttctactgaaaactataaaaatgactggagaggctgcatttgccaatgaaaaacctgctgctacattttcagaagagttgaagttgattgagaaaggaaacaatccaaaactaagactgcagtgaaaccagactcctccagaagatgatgtctaatagaacctaccttcataaaagtgcaaaggaggaagacactaggtcataaaccatggaaggacagattaaccctgaatagagtacaagaagatattttgagagagaaaccacattcatatggcttttattaacagtatattgtaattgctctattttattattagttgttaatctgtgcctaatttataaattaaactttatcataggtatgtagatatagacaaaaacagagcacatatagggttccatcttccaaggtgtcaggcagccatggggggtcttgcatgtatcccccctggataaggggagactactgtatagcaaactgtctttttattcctggaatgagtccaacttggttatggtgcattttgaagttgattttattcatgtattcatgaatgaaatgggtatttttttttattcatttatttttgagatgaagtctgttgcccaggctggagtgcaatggcatgatctctgctcactgcaacttactgcctcccaggcccaagcgattcccctgcctcaggctcccgagtagctgggactacaggcaatggaccaccatacccagccaatttttttgtatttttagtagagatggggtttcaccatgttggccaggctggtctcgaactcctggcctcaagtgagccacctgtcccggcctcccaaagtgctgggattacaagtgtgagccaccatacctggcccattttatttctttaaatatatctatggttttgatgttaggattaggtgggctcaaggaattttttttacaagctggaagaaacttgtctaagcttattttaatgaatttcaaacaattatatcttctaagacttgctacattatcaagctttctacttcatttacttttccaaggttggatctttcccatcttgttttgtgttccttcctttactgacaccgtctgtttcctaattattcttagtagagtttgtcaattgggttggttttgctcagagccagtatcagtcataaaagtcctgggcaatgaaaactcaccctcagcttccattctcttggtggtggccaacctacttaggggactcagaaggtggggaacctaagccctgggaggaattagggcagctgcaggatcagaggctcagcactgctgttttgtttctggtagctagttaccagaaacagtaatgaaatctcttgcccacacgtttctttttgtttgtttgttttgttttgagacagagtctccagtctgtcgcccaggctggagtgcaatggcacgatctcggctcactgcaacctccgcctcccaggttcaagtaattttcctgcctcagcctcccaagtagctgggcttacaggcgtgcaccaccatgcccagctaacttttgtatttgtatttgtatttttttttttttttgagatggagtcttactcttgttccccaagctagagtgcggtggcgcgatctcggctcgctgtaacctccacctcccaggtttaagcggtactcctgcctcagcctcctgagtatgagtagctggaattacaggcacatgccaccatgccctgctaatttttgtatttttagtagagacagggtttcgccatattggccaggctggtcttgaactcctgacctcaggtgatccacccgcgtcggcctcccaaagtgttgggattacacgcctggcctaatttttgtattcttagtagagatggggtttcaccatcttggccaggctggtctggtgacctcaggtgacctcagtctgccccagactcccaaagtgttgggattacaggtatgagccaccacaccctgcatattatttgattcttgatgtaaccctgttgtgctatgagggaagtactgttattccaattttaaaatgagggaaatggactcaaagccacacagttggtgagtgaaggcaagtgcttaacactccagccagacctagctgctcgctgcttcagcttttgtgtttggcttatgctgggttttggtgtgaggtgtgaggcctgcacgaggaagccctgatgacatggtgcaggtttcatgccattgcttccggggcatctgtcgtggttggtctgtgtctgcacccatatgcagtgtgttgtgatgagtgacccggtctccctgccaggcacaggcgatcagtctttcatattgcaggtgccttgtttctttgacttgctgataccctggggtcttcatcatgttcatcatgtttccttataaaggacttgacaggcgatggcgacggggaagatggggatggctctgacaccccagtcatgccaaagctcttccgggaaaccaggactcgttcagaaagcccagctgtaagtagccacacctcgagccaaagcacttgtggccaacactctacatagcatacatagcatgctacatacatagcatagctccttaggggagcttttaagagaaagtgatgaaaaaatgttttgaaactagaaaatataagcaaggctcttggactattgttggagggttttcttttttctttttttttttctgagacggagtctcactgtgttgcccaggctggcgtgcaatggcgtgatcttagctcactgcaacaacctctgcctccttggtccaagtgattctcctgccacagcctcccaagtagctgggactacacgcacctaccaccacacccggccagtttttgtattttcagtagagatgaagttttaccatgttggccaggctggtctcgaactcttgacctcaggtgatccacccaccttggcctcctaaagtgctgggatttcaggtgtgagccactgcgcccggctggaaggttttctctatgtgccatttctttcaggtggtttttaagttctttcttgtaacactcttggaggtgcctaggggtgatagagtttgcagggtggatggctcagctgctaatgacctagggagtccaccatttctgtgggtggattttgtgcctcagagttttgaggtatggcaatgggaaggcagttattgcttatggtcacccagccctttagagaccagactgacagttactatcccaggtgtgggttacagtcttcccttcccaggatatggtctgtatcatcccctttgtggagatgagagaagattccagcaacttaactgaggttaaacatcaactcttctatgcataatttggacacaggttctgcaacaaccaaattcatgccatttttgacaatgaacatggagcctaaggaattctattccatcttgatgatctggtgccttcctgaacccagtaattggccttatgcttctttgacataaaagtttattttagagtgaacacgaatttttctttctttctttctttctttttttttctttttttttgagatgcagtctcactgtgttgcccaggctggagtgcagtgacgtgatctcagcacactgcaacctctgcctccctggtccaagtgattctcctgcctcagcctcctgagtagctgtgactacaggcacccaccaccatgcctggctaatttttgcatttttagtagagatggggtttcaccattttatccaggatgatcctgaatttctgattgcaagtgatctgcccgccttggcctcccaaagtgctgggatcacaggcatgagcgagccactgcgcttggccagatttttatttttcaatcccaattggcaggtgccatttcagctggccatgtctgtctgctgtgacaggcagagcaggacctgctgggaattgtcgggcatcctagctggccaccctaccacctctattccaagaactggggaattctggctggactcagtccagagtcccacctcatcacctgttcacttccagttgtcctgaagctggctaccaggtctccttggccacctgaaggcctaatccttctggccccgccagaccccaggcctccagtcacctaaggcccagtgagtgtcctctcttgcttctaggtccgaactcgaaataacaacagtgtctccagccgggagaggcacaggccttccccacgttccacccgaggccggcagggccgcaaccatgtggacgagtcccccgtggagttcccggctaccagggttggttccccagatgcccagacccctgcccgcagtctctaactgggagatatgcctcactcactgcactactggttgtggctggtagataatctgtgtccttttttcacactgcttttcaggttcttgctttttcttttctctcctgggtaagcttcccgtaagcctgttggcttctctcctggtctgatctcagatgacactctgttgggaatggaagctttccctgttgacttggttcttgctctaacttggaaacaaggtagaaaacactgacatccagaactgtcttctccctcatgtcttcttcacctgtcttgaggcaaccctagcgggtatggcaacatttcactctctgagagtccctcgtcattacccatcatttgtgcctttgtcatctttctgtctctgggacagttacaatgactttctccccccttaagggatacgtgttcctggaaaagtttcttcagcggtctctgttctctttaacttcagtctttcctctttctttttgcctaggagccatatgggggtgccgttggtctctggtcaccgacatcctttgctctggcccaaactatgtgtccttctgtccacagtccctgagacggcgggcaacagcatcggcaggaacgccatggccgtcccctcccagctcttaccttaccatcgacctcacagacgacacagaggacacacatgggacgccccagagcagcagtaccccctacgcccgcctagcccaggacagccagcaggggggcatggagtccccgcaggtggaggcagacagtggagatggagacagttcagagtatcaggtatggccgagaggggctcctgcccagggtgactgaggaccctgaacacggggaaaaaccagttacctgctactgttggtaacagagcgacaacagttgttagaagtttcgtaattgtaataattgacatgtttgaattctaagtatcttccatatgcaccacggacctttctttaccttaatcctctcccagacataagtcaaatgccagtatttaccacgtgaatactgtggtttttcccaacatgacatttatgtaaggactgcaactgcgtacgttatacatttcatgtacgcccgtgtgaagagaccaccaaacaggctttgtgtgagcaataaagctgtttatttcacctgagtgcaggtgggctgagtccaaaagagagtcagcgaagggagataggggtggggccattttctaagatttgggtaggtaaaggaaaattacagtcaaagggggtttgttctctggcgggcaggagtgggggtctcaaggtgctcagtgggggagttttttgagccacgaggagccaggaaaagggatttcacaaggtaatgtcatcacttaaggcaaggaccggccatttatacttcttttatggtggaatgtcatcagttaaggtggggcagggcatattcacttcttttgtgattcttcagttacttcaggccatctgggcttaaacgtgcaagtcacaggggatgcgtgcaagtcacaggggatgcgatggcttggcttgggctcagaggcctgacaatacatattgtgattctgttcatcagagtgcacatactgtatatattgtacgtatgatacctttgtagacttgcttttttcttctattaagaactagagttgcctgaggttcatgtctggataataaatccagtggtctgggtcatagcttaattaaccgattcaggttgtttatgcttattcaagcattgctgcacgaagactccttacacatgtatgtatttatgtgttgttaggatcccttttttctatgtccattattacattttactttgtatagaagggatctcactatggtgcccaggctagtctcaaactcctggcctcaagcgatcctcctatctcagcctcctgagtagctaggactacaggcgtgcaccaccaagcccagctactttataaattcttttgtggaaatggagtcttgctgtgttgcccgggctggtatccaactcctggcctcaagcgatccccctgcctcggtctcccaaagtactgagaattacaggcatgaaccacggtgtctggctacatcttgcattttatggcaagctttttgttgccctcagggacagtggagtggacaggacttggcccaggatggcctctcctcactgggatttcttcatgtgggttttcttccaggatgggaaggagtttggaataggggacctcgtgtggggaaagatcaagggcttctcctggtggcccgccatggtggtgtcttggaaggccacctccaagcgacaggctatgtctggcatgcggtgggtccagtggtttggcgatggcaagttctccgaggtgagtccggggaagggcaaggggttctgcaggcctgaggctgtgcctgcctgcctccctttgaagacaaaggcctgggattgtattctgcagatgtgtgagcctatgccttcacactgtctgggaggaaggacaaaacttcctgtgttaaccagctacagcagattccactcacacgggggacaaaagtgctagaaagttctggatccatgggcagttggattttatgttatttcttagatttatcttttgggggcagaatcatcagtgtggactctgaggggccaggagtggccacgtgagcaagtacccaaaagtgttcagtggagaagcctggaagagaccggaagcatggccgcggcctcttgtcatttagccctggggagagaaaggcatggagttgggtttagggtcacctggtatcagttgtgaaaagggtttttagtagaattgggtatttcagagtctcttgatgattgattctagccttttaaaatctttcttggtaatgacatttagctggggaagagctgtgttgggcataactaggctgttttgattcttacactctttcaacaaagatttttttgggggcggtgagaatggagtctcactctgttgcccagactggagtgcagtggtgcgatcttggctcactgcaacctccgcctcccaggttcaaacaattctcctgcctcagcctcctgagtggctggggttacaggcacctgccaccgcaccctgctaatatttgcatttttagtacagactgggtttcaccatgttggccaggctggtctccaactcctgacctcagatgatccacccgcctcggcctcccagtgctgggattacaggcgggagccaccacgcctggcctcaacaaagattttaatcagacagacctatcctgtgatggtctcttagaagtaaatgttagtcctaccctcagagccctgagagaggctaagttaggtgcctaaggtcattgggcaagttgcagcagaagcaagccaggcaggattgaaggaaggactgtacattcctgggattcagctcaagcagagattctgtttttcccaggaattgagctaccatggggccatttgccatgagctaattgaagtttcccaagggctacaataatatattgggtgtggagtctcctttgtaggagagcccctgcatgcagttgcctgctgtgaccagcagagggaggacaagtcctgggcccatgctggcagtgaggcagctgcttccagggatgggagagcagtaactcaagtgaaggaagatggattgtttgcaattgctttgccccatcgagacataaaatgcactttgcaagatagagtctgaggctaatacaatgcagtgtggggctgtcagcattaggggatgagatgacaatatgggacctgggtctggcctgggcaagtgcctgctcagcatgtgtacgctgtttgggttgtattggagctattgggcgctggaaccagcacttgtgttggagcggtttccccccaccagagccacagtgttttctccccagtggtggtcacacccccatataggaaatcaggcattccgtgataaaatggaggtttgcatgagtgtgagcactctttacggagactagaacattccctgtgtctttcagttcctttttttttttaagagatgaggtcctcactgtcacccaggctggagtgcagtggcactgtcttggctcactgcagcctcaatcacctgggctcaagcaatccttctgccttaacagagcagctgagactgcaggtgcacaccactgtgtttggctcttaaaagtttttgtagagatggggtcttgctgtgttgtccaggctagtcgaactcctgggctcaagcgatcctctcaactcccactcccaaagtgctgggaatataggcctgagccactacgtctggcctttcagttctgattagcatccctgaatggccattttctctctcactggcaactcagtcagttcatgcttggtccagggacttggtacatcaggagacttgtggaatatggattaaatcacaagaactaaagttaaataatcacaacaagtgaaaggtgctgtgtcgagcactgttttctaaacacattcattaggtgaactcattttaataaaagggtaaagagtaaacaattatcatgcttaggaaagaaggaatatgtgcaaaccctcaatgctggagcagccacagagaatattaggactgagcctcaggggtccacaccagggacacctgcttggaaaatgtatacaaacacagggttcgcctaattgccttcattcagagtatcctccttttccacagtggaagtgtcgtacctaacaaggttctggatatctgtgtgttgagactctgccatttctatttttctgcttttttctttccttcctttcaaatagatgtctgtggactttatccccaggaatggtctcttggttaaagtgtgtgaaaatcttctgcatctgatggacaacattgtgatagacatggcacctgggacacacctgtaggtggatgttgatgatgtctttctcttttaggtctctgcagacaaactggtggcactggggctgttcagccagcactttaatttggccaccttcaataagctcgtctcctatcgaaaagccatgtaccatgctctggaggtaacatgggatgagggaatgagggctaagccctgagagcagggatgaagcaagagacccacagaaacctagctcagtgttgccaagggtggtttggaggggacagggtggccagggaggaggtaaatgacaacataacatgatggccaccggattgggcctcccaacaaagggatttgagacatcccagctgccacttattgggaccactaactgaatcagaaggaaagagcacgggcagttaggggtgcaatattcgtatcagtgaatgtgcttttccagagacctcagagccttcttatgagggttggagttcacagcaagacagcagtggaggccagctgtcttctatctgtgggccgtcttatcccctatgaaccattataccctgtttctcccttcaccttgattttttccccccacctttgttcagcatttaagagccaacctcttctcattgctaaaggcttcattagacactgaaatccttggtccttcatgtaggacacaagttaatgtccccatctttagggagataaaacaagaaatctagtgccgccttatataagatacagaggagatgagatagtgctggctggggcttctatatcttggtggtagagttaattctgatatgtctgccttttgagtgggaggtgaccactgacattccctagggggaagagatcctatttggtgcctgcatgaaaagatttaaccacaaccccccttccgaggcctctccctgcacaggcccctccttcctctgtcacataccacagcccaggacagctgtctggctatgaaagggcccagtgtgaaggggaatgtaggccctggctgggggaatccctgggtgtggcctggcgagcacctcctccccacccccccattcatcacagactctgcctttgcagaaagctagggtgcgagctggcaagaccttccccagcagccctggagactcattggaggaccagctgaagcccatgttggagtgggcccacgggggcttcaagcccactgggatcgagggcctcaaacccaacaacacgcaaccaggtgggaatgagtccccatggcagcacccgctgcctctgctggtgggaccacttcttgggagagtcagccacccctgctgccccacaccccacccagctttctagcagctggtctcaactctgaatgttggaaaaataggagcaggcatacgaaggctgtgccagctctatctggcttccccggccactttcttgctgatggtcacgtgcatataatttgtattgaatctgacatctgtcttgaagtcaggatgcagtgttgactagcaccttttttattaaaggaaaaaatagttaagctatgctcatttgagaaaattggaaagtgttaaagaagaatatgccacctgctaacattttgaccagtaccatatttctcccattataagataactctggtttctagaaatccaggacttgtcttacaatccatagatttaaaggccaggcctagtggctcatgcctgtaatcgcagcactctgggaggctgaggcgagtggatcacttgaggcgatcacctggacaacatggtgaaaaatagaaaaattagcctggtgtgcttggcatgtgcctgtggtcccagctacccgggaggctgaggtgggagaattggcttgagcccaggaggcagaggttgcagtgcgccgagatcgcaccactgcattcaagcctgggtgacagagcaagaccttgtctcaaaaaagaaaacagtccatacatttaatgtaatgttttttctgttttgttttgttttcccctcaaaagtggttaataagtcgaaggtgcgtcgtgcaggcagtaggaaattagaatcaaggaaatacggtatttccttcctgtcttttgactgtgccctgttttctatgcactttcttctgatttctttgcatataaaatggtcactggaaaagaatcaaatttcttgaaaagtcaatctgaactccctccccactctcccctcacatcccaccctcacaaataccctccaggttaacgttgggttgcacatccttccagatttttctgaacactagttggattcctgctttcccctttattaatattaatactgtaagcactgtctgatgtcattttgtcactaaagggtccttaagatttttaatggctgtacaattttctttcctagggtcagagtcaaatttaaccatgtccattaagattttctgtgtagatggaatagaaatacaaatgggttttacaaaatcccatttatagaatgggagccatattatgtaaaattaaaaagtgctgggctcagtggctcacgcttataatcccagcattttgggatgcaaataaccatctcttggatttcccagcattttgggacgctgaggtgggcagattgcttgagctcaggagttccaagaccagcctgggcaacaggatgtaaccctgtttctaagagaaatacaaaattagctgggtgaggtggtgtgtgcctgtggaggctgaggtgggaggatcacctgagcccaggaagtcaggctgcagtttgctaagatcatgccactgcactccagcctgggtgacacactgagaacctgtctcaaaaaaaaaaaaaaaaaaaaaaaccaaaacagaaacaaaaaagaaagaaaaaaacgaggccaggtgcagtggctcatgcctgtaatcccagcactttgggaggctgaggcaggcagatcccttgtggtcgggagttcaccagcctggccagcatgatgaaaccccgtctctactaaaatacaaaaattagccaggtgtggtgctgcatgcctgtaacaggctgaggcaggagaatttcttgaatccaggaggcggaggttgcagtgagccaagatccacgtcattgccctccagcctgggcaacaagaaaggaacaggtgaaattaatacaaatcatgatttttttagcgctaaatttccaagatgttagcattttaatatccagctattataaaaactgagatagtctacatttatagtgctggtttcaaaatttcacttattttatatattttacatattacatattttacagatctcaattttgatgctaaatttgcaatgaaaatacttgatctgtattaactatatacagattcttgactaaatacagatgtagatggttaaacacaaattaactaaattcataaaacgtgcatttgagaaagcagactcatatgtctaggctagtcttaatgagccagttagttgacttacttgtcagtgttttaattaaccttaaatgcagaattcatttcctcaacagtttcaagttctcagtagccaccccctatgcctactgcccagcatgtcagatatcacagacatgggtatgccaggcttttagctttgaatcgagctttgctctctgagctgagtcatttttacatcctagttgtagccatttaaaaccttgtaaacatgtgttaaggatcctgggtgcaaggggttttgaatgagctcctgttgtgagttgcccatcaaggggccatatacattcagtgtggaccccctgtcatgccccaattgcagctggtacccaggcatagcatggtcttgtcctgggcccgcattctctctggaccctcctaccaagccacggctgcagtctaattacctttcacagagaacaagactcgaagacgcacagctgacgactcagccacctctgactactgccccgcacccaagcgcctcaagacaaattgctataacaacggcaaagaccgaggggatgaagatcagagccgaggtgattgttgggtacctgggatcatgggacagatgggaggaggacgctgcagatcaggaattgatctgtacccggctccctgacctcatctcatgccttcttcttttctcaatagaacaaatggcttcagatgttgccaacaacaagagcagcctggaaggtaacgttctctccctcccagtcatccccctcacaccctggctagggctctaggcctgccttgtcctggctcatccaccctgtcagggtttaacccagagctctgttccttaacctcaggccaaggcctatttctggaccctgcatcttagttgctagtttatggaatgagttgccaattgtgccccttaagagaaaggtacaggaagggtatggtgaggaacaagggaagctgggccattttggccgggagagccataacctaaaaccaagattactggtatcatgaaccttcccaaagaagaactgcaactaacaagcttttagtcacttgcctactgtcaggctaaatactctgcttgccctggctggggattgccactggattggatactctgatcagaatatacctcatggaatacagaatgtgtgaggatgaagtctcccttgcttccttaacccctagttactcaatgttgaataggaaaacaccacatccctgacccagagaacccggggaagagcttcggtttagaaatcctattccccaagactcactcccccatctggctaggtagggatgcttgtttgtgggttttataaaggtcctatctacccagccagggatgcaactccatgctgacctggtgatatgaagggaaggcagggttgcctactggttaaaggacctggattctgaaattacagccatttgctgtttacagggtgtgggcatgggcaagtcctatcatgagacaacaagccaattggagtcaccacaaaatccttagtgtcccagtatttaaagcttctcaaggattgtcacaccagggaggtccccctgctcagcgttctgcctgacatcatcctactggggcagccccttgcccatcttgatgttccccatctgtgaagtagggatgccacctggaagcattgttgagtggtagaagctgtgaggcatggcctgaggtgcaaagagtccttggcaagctgctggcctggagggaaatcttaggaactgagagaccccaggctttagcagctggtgtcagggcctcaactgccaaaagccacaaccctgtttttcttacagatggctgtttgtcttgtggcaggaaaaaccccgtgtccttccaccctctctttgagggggggctctgtcagacatgccgggtaagtcctcctactactgccctggaccttcctccccttgcctcctctaactcccctctccttcccaacagcacctgtgtggagactcagtgaagcccactcatcccagctgccttgcactctgcctctggggcaggatgggggacagctgtcacagaggccaatggcacgcaggtcacagccagttgtccttttaaaggacaccaagccaccagcagtgtgttctgcagctgtatcctagggcctccaccagcaagccggcagggcctgcccttctctggtctccgatttcactggtgtttctctctggctgccaggatcgcttccttgagctgttttacatgtatgatgacgatggctatcagtcttactgcactgtgtgctgcgagggccgagagctgctgctttgcagcaacacgagctgctgccggtgagcactgggccctgtggggtggatgtgggtgggcccccaaggctcctacgttcctgcagtctgcagacagctgtctgttgaatggaatcctaggcatgggaatagggagctaatttgccctggaagcagcacacagggtttatattttgtggtggctgtggttgtagcataattggagtagaactcatgtatagggaacggctcttttttttgagacagggtctccctgtgttgcccagggtgtacagtgacatgatcataggtcactgcagcctccaattcctgtgctcaagcaatcctcccacctcagcctcctgaacagcttgattataggcacatgccatcacacccagctagttattcttttttttttttgaggtggagtcttgctctgtcacccaggctggaatgcagtggcacaatcttggctcactgcaacctctgcctccagggtacaagcaattctcgtgcctcagcctcccaagtagctggaattataagtgcggagcaccacgcccagataatttttgtgtttttagtacagacagggtttcaccatgttgaccaggcttgtctcgaactcctgacctcaggtgatccacctgccccagcctctcaaatcccagcactcccaaagttctgggattacagtcatgatccaccgtgcctggcctattttttgtaataaataaaaagtgtaataaacgctgcctcggctggtctcaaatccctggggtcaagccattctcctacctcagcctcccaaagccccagagttgtaggtgtgagccaccacacccagctagaagtgctcttaataggccaagagcatgagggaaggggatgagtagggtgtcagggaaggctaattccctggtttgccagttggcctgtaatccaaagtgtccatggaatgaagtaggttgtcgggagagcatttctgatcagagagcctgtgggattaagggggttggggcatccaaggaagacgtcagggaagcccgtactgcacagggccccgcaggctatgctgttaagcagccgatcctaggtaagctttcaggagggggttggcatttccctgtggaagtggtaagggggtggcacaggagaccagctctgacaaaggcatcccttctccctgccactgggtccaggtgtttctgtgtggagtgcctggaggtgctggtgggcacaggcacagcggccgaggccaagcttcaggagccctggagctgttacatgtgtctcccgcagcgctgtcatggcgtcctgcggcgccggaaggactggaacgtgcgcctgcaggccttcttcaccagtgacacggggcttgaatatgtaagccacaggctcccgcctctaccaccacagatcccaggggcacagggtgttggaaagctctggaattctcagaaagagtaatagaagtaaagacacgttgtacctcttggagcctcaatggctgagagacctggcgaattgccagctcctctgcacggttttcagccgtgccagggttcattcactccctccttgccggcttctcagcgtatggattttcaggggcctgatgaagaaatggttgtatgtagccttctgagttagcagagctgagagggaaggaaacagtagaaatgaattttctagttcttagagggaagccctaggtcattcctgtctggggtgataccttttcatgtgtgcctctgtgcatacatatctggctcatgtccaaggataaattgaccattccttgccaaatgcaggctcgtgtggtacacacttgtctccccaatccccatcaagccttcagtgggctttttgcagtggctacggcaaggtttgaagccctctgagcagggtcagcctgcccctccctcagagcttgagtctttgccctgtgccttcaccaccatgacctccttccttacctggcaggaagcccccaagctgtaccctgccattcccgcagcccgaaggcggcccattcgagtcctgtcattgtttgatggcatcgcgacaggtgagttcggggaacacctggagacactgctatcgtgtcacaacagggtagccagggagtcagaaggcatggttaaggtgtctgacatcagtggcaagaaaggtccctggggattaccagccctgaaaaaaaccctgtctccttgtttctctccaccttctcaaccaccttgcagtcttggtcattgagttttatttatttattttttcgagatggagtctccctttgtcacccaggttagagtgcaatggcgtgatctgtgctcactgcagcccccatctccgaggttcaagtgattctctcctcagcctcccaagtagctgggattacaggtgctcaccaccacgcccagctaatttttatatttttcgtagagacggggtttctccacgttggtcaggttggtctcgaattcctgacctcaagtgatctgcccaccttggcatcccaaaccgctgggattagagacatgaaccaccgtgcctgggcagtcttggtcattttaaaaggacatacatcttagctgttacactttattttttatgtgcagttatcttgaacttgattttcattccacatgcataagtataattggagataaactagttaacaactactgctacctctggttttggttcccttcttttcctcctatatggagtttacacagccaatatgtgtggtgcgtgtacagcctttgctggattgaacgcatgtgatacagtcatgaggaactgttcattttaccatagcagggagtggaggaaatgagctgctgtgtgctcagcatcatttatgcttctgtgtctctctggcccccacaggctacctagtcctcaaagagttgggcataaaggtaggaaagtacgtcgcttctgaagtgtgtgaggagtccattgctgttggaaccgtgaagcacgaggggaatatcaaatacgtgaacgacgtgaggaacatcacaaagaaaaatgtgagggcagtctgtaccttgcgggcctcatctcttcctgtctttttccccagtcctccacaccctgaaacccacatgtaggccccatccctgagaccccagaaaaaaggattgaaatcctgtgggaatcttaagcattaggttagggtcagaagtggagttggtgaccaagcaagattctatttttttctggagacagtctccctctggagtgcagtggcatgatctcagctcactgtaacctctgcctcccgggtttaagcgattctcttgcctcagcctcccaaagtgctgggattacaggcacctgccaccatgctgggctaatttttatatttctagtagagttggggtttctccatgttggccaagctggtctcgaactcctgacctcaggtaatccacccccgccgtcagccttcctgggattacaggtgtgagccacctcgtccagccccacgcaagattctagaagtgggtccagctctctttccctctgtccacaccctcatcctgactctgtctctctctttcagattgaagaatggggcccatttgacttggtgattggcggaagcccatgcaacgatctctcaaatgtgaatccagccaggaaaggcctgtatggtgagcatccttctctctggcagtccctggagagcctatgtcacctgaccactggcccaggtgcagcagcctgagaaggagccacttgcttctggccaagttactggcagcatcaggggcctgttggtgctgcctacgctccatagtaaatcctcagcccacaagggaaataccctagtaaatagtgccctgctgctgcctgtgtccctgctgtcattcaggtggacatagactggtaggcatcaccctgaactgtcaggaggccattgggaacctgctggtctcagggaataaggtgggttgggctggaggtttcaaatgaaccctgcgctgtcatcttttctgagcacagagggtacaggccggctcttcttcgaattttaccacctgctgaattactcacgccccaaggagggtgatgaccggccgttcttctggatgtttgagaatgttgtagccatgaaggttggcgacaagagggacatctcacggttcctggaggtgagggaatctggggacctgattgtcacagacagccagggcagggaaagcgctgctggcagtgatgattggtgggtgttgccaacattgggaatgactttcccgttcttggtctggctagatccaatagtgagggattcagtgggttctcttagtacatggaaaatattttttttgagacagggtcttgctctgtcacccaggctgaagtacagtggcattattacagctcactggagcctcaaacagctgggctcaggcaatcctcctacctcagcctcccaaatggctgggactacaggggcacaccaccgtgcccagccaatttttgtatttttggtagagacagggtcttggtatgttgcacaccctagtcttgaactcctgggctcaagcaatccgcccacctcccaacgtgttgggattggagatagagatgtgagccaccatcccctgccagtacaaggaaaataattgatctctaatctcagcccaactctttgaagtcagaaatgatgaaacaaaccatcatctgctgttaaggactcatgagatttgactcaattttttactctagagagttttctcatttttgatatgaaaactgctttagaccaggcacagtggctcatgtctgcagtcctagcattttgggaggctgaggttggaggatcacttgagcccacggtgtatcatattttgtaataatctggcgtatcccaggggataccgtctcagaatctgcaggtttgaccttatctctttagctaccattagcatagtatgagggcatttaccatgtcctctagccagcctcctgatggcagtaggtctttcctgttttggaggatccgtgcctcatccatagtcagggaatagccctgtcacctgcaaaggtctggttgacactgaaactctaataataggctcctaacagtaaccttctttctccccacagtgtaatccagtgatgattgatgccatcaaagtttctgctgctcacagggcccgatacttctggggcaacctacccgggatgaacaggtaacaaagggctcttagtgggtcaggtaacagccaagttaaatatgtgataacaagctctgacattcaagccttcctagaaagacctggctctgctgagaaatagttatacttggatttcagaccacctgtggtcgtgcgggttgatctctgttaagatgttcagcaagtacctgggaatctctgtaggagtcccactcttacctgttgtaagctgctgatggacctgatcctaaaagtcccacgtggctgggtgtggtggctcacgcctgtaatcccagcactttgggaggccgaggctggaggatcgcttgagcccaggagttctagactagcctgggcaacaaagtgagaccccgtctctacaaaaaaataaagaaaaatacaagtctcatgagctgtggccagactgtgtacctccttcctgccagggatctctcaagacttgagcttgttgatgctcctgcccttcacctctcctccccgttgatgtagtgacagccgtctggaaatggaagtagattgttgttaccggtgcctttcctcctgccctggagatgaagcgatcttggccaggctcatggtgaccaaccaggtggcagagctgctatgacaaacaatagcccaaagactatgtccctcagattctcatcaccaggagcatttcatattttgttatcgtatactaaaaacagtcttcttcagacactctgaaagccacaaagcagctttgctgaggattaattatttcttctatatgtggtttcaaggagaagaacttgctaattaagatgtaaaatgttatggtaatgtgacatcccagacttgcaaatgagttgagcttaaaacattctcctgtagaaggaggcatggaaacataataaccttctgccacttagtgaagtgtggacagaggtgagggtcctggggtagcttggaggatttttgttggtcaccttgcccgtgtacttggctaagcagccagtcttagggtgccatgtctgtgtctggaattaaatgggttaatgctttcaacatttgaactcccagtaggccaggcactgttacgctgttgccattttcatggttaaacacatcatgtcgatagtgacatgccgaagggggagggagagaagacaatgatttggggtttattgctggcggatggacattggaagggttgatggggaaggcttctcattctagcgaaggtcctaagtgaagggatggacccatgcagttattagagtactccaggtgggaagagggtctgggatgatgggaaacatccccagaccagctcagagcaccctaggtggggtggctgggagagaaggaccaagtaacttgggccttaatgtggtaccgctgaaatcactttggcatgggaagttacagatgagatgaattgtgctttggttcatggtagtttctgggtggattatagacaataacaggatggaggcgggaatggggagacaagtgaagggactagactgctcaaagaaggagagatgactgattatgatgttatgccccaggaggtgccatccatagagaacacagtgtgagtggtggcccctggggtttgcagcacagcaatcctgtgacttagcaaggacggatcagattcaacatatgtggagggtaggacatttgctgatgcattggatgtgtaggctatgaggtggaaagagcagtgagacctgatgcagatctgatgctgtgactaagctctgcaggcttataggatgggtgtgtcaggcatcatttaggggacagacccaagtcatctggcttgtttagagcttaatcttatagtcagcacaaggcggggctgtgcagtgtccttttcttctgggccctcagctcccctgggtccatgtcggaggtaggaatggggatagaggtagcatttgaagcctggcaggtgaggtcaaggaaatctatcagtctaggggaaatatgtgttgtgatttcctcagcccctcttgtaggcacggttcccgttctcatgtctgagttgtttggccttgacgttcctaacacaggttactatggccgtccctgcgtccagtcctcttgcaccagtttctgttctggagctgctcaactactttcagttctagcccttgcccttcttagtcatctgtttgcctctctctgcatttgcaaaataattttcaagggtgaaagttaaaagggtgcttagtctttttttttttttttttttttggaaccttaagagacagggtctgtctcccaggctggagtgcagtgttgtaatcataactcactgtagcctccaactcctaggcttaagcgatcctcctgctttgaactcccaaattgctgggattaagggtaggaaccactgcaggcggttgccattcacttttaaagcctcctgaggctgtatccccagcagtgagccaccaaaccgtgggtgtgatatgataattgtatcaggtagacccacaaaaatctattccaagctcctcactttaaaatagacaggaagcccaaaggggtagtgtgactcgctcaagctcagtcagtgagcagtgtggagctgggacctgaggtttctcctgccctaccccatgcagtgttcctgctcaatgggaacctgactttgaagtccaggcaggggagcattacctcctggatgctgggctgtcccctctagcccatccttggctttggcacacaggcttgtgctcatgccaggatcattttcatcatttatttgtagccaagttcactgccagggcacatctctgcaacatagaccctcactcccaccttgtgcctagcagaggaccctctatagctagtaagaagtaatgggttttggctgttcccaggcccgtgatagcatcaaagaatgataaactcgagctgcaggactgcttggaatacaataggatagccaaggtaagacgagctgtggccctctggaaaaatgcacttggtgacctccaagtggggacttgggagatgaccttggtgtttgattggttcctactcctccccccacgtgacttcctggtgttgggcttccctctcccacatgattgttctgtcccatcctcaaatacagagactaggagacattcgtgataagtaatcacgacgagaaaaggcaactagtctttttaattttagtactggatacataaagacaaagagtttcagctggccctctcagggagaaaggaatcattaatccttttgccaaaaaattaatttgctgtcaagtcatagaatatgaagacctccataaacctaaatctcaatgtttgcatcaagctaagatccattttctaaactccaattgagcattctctgtatctgggtggtttttacttttttacttaatcttgcttgatcaggaactctggtgtcttcttggccccccacgtgatctcgttcatggtcacttttttgtttatctcattttctctgaggctggtccttcctgttaacgtcttggcatttgtgggaagcacaaaatgttcttgtctctccaactctgcttttcgctccctgccctgccattcctctcccgcgcctgccctctcccttccatctttcccaggtacttttctctcccagccctgccactcttctgccgcacctgcgctctcccctccatctttcccaggtacttttgagccttgactccccaggtcccttcattctgtgctcactccatgatgtcattttgttctccagttaaagaaagtacagacaataaccaccaagtcgaactcgatcaaacaggggaaaaaccaacttttccctgttgtcatgaatggcaaagaagatgttttgtggtgcactgagctcgaaaggtgagcaaggctgcacttggagagggaaactgtgtagatcaaaacacaaatgggcagacatgggcaggtgcttaccttcattcttgatggcctcactgccctttggtgttactggggcgaggagtaataataccttttcatagttcgcccttatttcctgacaaaaatggcggagggggtgtggtggtggtgaggaatctgagacatgaggtcattaggccacaccatctgtctgttggctgcactgccgtgacatctgcctgtcccaacatgctgggacactacgatgtgtgagaagccagtgaaagaaaaccccacagacatgccattcttgaagacttcagtttgctcattctataaatgattccttcttagccacagtttatcctctccttccctttctttgggctaagtttgtctgttttgatgcaaataaccatctcttggatttcagttctgttctgttctgttttctttcactcctctattgtttgttcattttgcttatactattttttaaaaatcattatttgctatagtgattatggctttgaacattcctctttacatgtattctgtattctgaaggctttgatatagagtattttcattccagatatttcacttctataactcatttaatttcttctttgacttaccaacagttttctgagtataaaagtaacttctgattagtatttatgctgtagattattctgtatggacctaaacctaaaatggttggtgcagatggctgacattgtgtagacgctaagaccaagcaagacacaggcctgaggtatcacatctttggcatgtttctgaataacccacgcagccattggcctgttgggatgacttttagtattggattgtatacctgagtaacactgaggctcagcctctgtagcctctttccaggcctggtagaatcctatagaggaagcttttggtatatttgatgccatctgcctggagtcatctagcatggtccttcatccggcagctgggtttgaagagggaaggaaaactctggttgcctgagcctgtgatgactgaaaatctaggctgtttttgagtgaccttgttccttattaaggaaattgcttaacttctcccatcatagtgttttgaaaatggatacattgctggctggctgatttagtatgcatgcatttattctaggaaggtcctctgagcaccaactctatgccaagagtatggtgctaggcctgcacaaaacgggggactttcatttgtgagcaatttgtaagcaagtgttctgaattaagggctctgaatttaggtccttggggaccttactgatgggactgagggatggcgagggcagaaagagtgggacctggctggttgaggctgtcaacatcctggaggcacttctgacttgctgtcttttcactccggtacccccaggatctttggctttcctgtgcactacacagacgtgtccaacatgggccgtggtgcccgccagaagctgctgggaaggtcctggagcgtgcctgtcatccgacacctcttcgcccctctgaaggactactttgcatgtgaatagttccagccaggccccaagcccactggggtgtgtggcagagccaggacccaggaggtgtgattcctgaaggcatccccaggccctgctcttcctcagctgtgtgggtcataccgtgtacctcagttccctcttgctcagtgggggcagagccacctgactcttgcaggggtagcctgaggtgccgcctccttgtgcacaaatcagacctggctgcttggagcagcctaacacggtgctcattttttcttctcctaaaactttaaaacttgaagtaggtagcaacgtggctttttttttttcccttcctgggtctaccactcagagaaacaatggctaagataccaaaaccacagtgccgacagctctccaatactcaggttaatgctgaaaaatcatccaagacagttattgcaagagtttaatttttgaaaactggctactgctctgtgtttacagacgtgtgcagttgtaggcatgtagctacaggacatttttaagggcccaggatcgttttttcccagggcaagcagaagagaaaatgttgtatatgtcttttacccggcacattccccttgcctaaatacaagggctggagtctgcacgggacctattagagtattttccacaatgatgatgatttcagcagggatgacgtcatcatcacattcagggctattttttcccccacaaacccaagggcaggggccactcttagctaaatccctccccgtgactgcaatagaaccctctggggagctcaggaaggggtgtgctgagttctataatataagctgccatatattttgtagacaagtatggctcctccatatctccctcttccctaggagaggagtgtgaagcaaggagcttagataagacaccccctcaaacccattccctctccaggagacctaccctccacaggcacaggtccccagatgagaagtctgctaccctcatttctcatctttttactaaactcagaggcagtgacagcagtcagggacagacatacatttctcataccttccccacatctgagagatgacagggaaaactgcaaagctcggtgctccctttggagattttttaatccttttttattccataagaagtcgtttttagggagaacgggaattcagacaagctgcatttcagaaatgctgtcataatggtttttaacaccttttactcttcttactggtgctattttgtagaataaggaacaacgttgacaagttttgtggggctttttatacactttttaaaatctcaaacttctatttttatgtttaacgttttcattaaaattttttttgtaactggagccacgacgtaacaaatatggggaaaaaactgtgccttgtttcaacagtttttgctaatttttaggctgaaagatgacggatgcctagagtttaccttatgtttaattaaaatcagtatttgtctataactgtctgatgtcccttttcttctgcaggtcagatggatgggacatgggggagggcctggctaacatgtcagggtgggagtttggaagtaggtgattcattcattcatgtattcaaacgcaatgtgaccccaagctgactggagcttacttacagtgtaatacactggttctgcaccattggctcacgcctgtaatcctagccagggtgggcggatcttttcagtccaggagttcgaaaccagccttgccaacatggcaaaaccccgtccgtacaaaaaaaaaaccaataatccaggctgggcacggtggctcatgcctgtaatctaagcactttgggaggccaaggcgggcagatcacaaggtcaggagatcgagaccattctggctaaccctggaaaccctgtctctactaaaaatacaaattagccaggtgtggtagtcccagctactctcaggaggctgaggcagaagaatgtcgtgaacccaggaggcggagcttgcagtgaacctagaccgtgccactgcactccagcctgggcaacagagcaagactccgtctccagaaaaaaaaaaaaaaagaatccagcacatctgcttcccttggagggcttgtcagggctgtggttgctggcccaacctccagagtttctgactccaagtggaccctaggaattttcagtcacacggtggcacaattactgctcattgcagcctggacttcccggactcaagtgatcctcctctgtcagcctccaagtagctggtaccacaggcatgcaccaccacacccagcctgaccctaggaatttgatgccactatccagggaacacaccggactagtgaatgggtatctaactcatggttcccaaatatggcttgagtgtctgaattcatttaaaagctccatgtgtgggacacctgtttccagacatacagatattggggaactgatcaaggtgataatcacctctagcaaaagatcctaatgatgattctcacagtttgtcgcgcttcggtgggattctataccttattccacagctcccaagttgatgtgttgcaggtcaaccaccttccgtgagggggctaattgggagtggccctgtggtcccagcctagcccgtgtcctctaccctttggagtgtgattctcagcatgcccccaactaaaatcctggccttcaatgagcactcacgatgtcggttgcccttctaagcctaatattgcaacaccagtaatcccattttactttacatggggttccccaggcagaagtcccaaggccagagcccatcgggccacactcatctccagcctttggtcagggaaaaaggttaatgctggttagctagcgcatttagagagggaatagggtggtgcacttggggttcacccactgaacaccagtcagaccgagcacctctgagcctcccaggccatgtgtgagttgggctataatcatggccatctcttaaataaggtcaggtttctaaagggcctggcccagggtttggggagggaagaagcttccagagtggaaggatgaacatgttattagaaaggtgcttcaggactagaacagcccacgtgcaggttgccatggtgagataactggcaattagcaagctagccccacacaacctcccctgcctccccgggtattgagaccccagggacctgggccacccaattaagccatcttgtgtacaatgctgcaccaaataccaggacaggatgaagccagctaaacagccctggcctcgaaaccctaagacagacgggcaagccctccagatgaggggtccttggcgtcctggcctgcttgttggagttgggggactcagagggagtatgggggtaattcttgtgttttctcaagatgaggttaggctggtatctgagtgatcccaggtgttgaggcagggggagaatgcagtgagtgttctgatctggggaaagaggttggagtttgaatcctatgtgggcctttgctgaagcagtctttgggtttgcttggatttgtgtctggggtctggcatgtttctgtgtcacttggagcaagcagatgacttaacctcttggggtttttcatctctcacctaaaaggtggagataccagcccggtcaacatggtgaaaccccatctcgaccaaaaaagacaaaaattagctgggcgtggtggcatgcacctgtcatcccagctactgggtgtggctgaggtgggagaatggcttgaacccgggaaatggaggttgtcgctgtgagctgagatcgcaccactgcactccagcttgggcgacagagtgagactctgtctcaacaacaaaaaaaagtgataaaatggaaataataaatcctacctacttcatagggttactgaagttcaaaggccagatctaggtaaagtgctttgcctgacacctggcaggcaataaacttcacatatatgagatggcattattgtaaaaatgagacctattaatcaatgcagtgctaatgacaatgaagactggatgcacgtagtgatagtaacacacaatgtttatcaataataatagccataggccaggcacgctggcacacaccttgcaatcccagcactttgggaggctgaagtaggcagatcacttgagttcaggatttgagaccagcctgggcagcacggagagggtttcacacccccctctacaaaaaaattttaaaattagccaggtatggtggcacgcccctgtagtccagctactcgggaggctgaagtgagaggaccacttgacctcaggaggtggaggttgcagtgagccgagattgcgccactgcattccagcctgggcaacagtgagaccctgcctcatacaataatagtaatactttttaaaaggcagggtaatatttccccagatgttgtcagcagctaggctgactggtgtcaactgtagcaacagtggcatcgggtgtggaacttgtgcccctcaccaccccccacatcctgtagagatcccaatgctccttgcgagggttcccatcctgtctccacttccctgctaatttgtgaccttgggcgtgcttgggccttgtttacccaactataaaatagggataatatcaacatcacagagctgatgcgcggatcaaacaattcagtatatgtgaggcacatgggatggggactgaatgctgagtaaatgacagtgacaaatgacccaaaaatgcttttttattactgttagagaattctggcaaccctgtgaggcctgattaccatgattataagtaagagaactgactccaaggaggtctcatcacatacccaaggtcacccagctagcagcaaaaggagttgtgcattggaatctgctctgggaagccagtctactttttctccttggtctcacctgcatctttgttcttgtttgttgttttgctggagcttgaaattacctgctgccctttgtagcattttgccctccttcctagcttccttcccttccttttatcctgcctacttctcccctttctttctttcctttttgtgtaactttattggttttttttttgagacggagtatcgcttgtcgcccaggctggagtgcagtgacgtgatgtcggctcactgcaagctctgcctcctgggttcatgccattctcctgcctcagcctcctgagtagctggaactataggcgcccgccaccacgcccggctaatttttttttattttttagtggagacggagtttcaccgtgttagccaggatggtctcgatctcctgacctcgtgatctgcccgccttggcctcccaaagtgctgggattacaggcgtgagccaccgtgcctggccactgatccaccgcgcccggccacgtaactttattgatttttaaaaactttaaattatgccaggcacggtggctcacacctgtaatcccagcactttgggaggcaaggcgggcggatcacgaggtcaggagatcgagaccatcctggctaacacggtgaaaccccgtctctactaaaaatacaaaaaattagctgggtgtggtggcgggcgcctgtagtcccagctactggggaggccgaggcaggagaatggcatgaacctgggaggcggagcttgcagtgagccgagatcatgccactgcactccagcctgggtgacagagcgagactccatctcaaaaaaaaaaaaacaaaaaccccacaacttttaactaaaaaatacgcaggccaagtgtggtggcacacgcctgtagtcctggctacttgggaggctgaggtgggaggattacttgagcttatgagtttgaggctgcagtgagctgtgttcctgccattgactccagcctgggtgacagagcaagactctgtctctaaaaaaattactaaaaattggtaattttggacttacagaaaacttgcaagaatagtagaaagaattcctaaatactcataacccaaattccccagatattaacatattgtcacatttcctttgtcatcttctctatatattaataacatttttctgatctcggctcactgcaacctctgcctcctgggttcaagcgattctcttgccgcagcctcccaattagctgggattacaggtgactgccaccgtgcctgactaatttttctatttttattagagacggagtttctccatgttagccaggctggtctggaactcctgacctcaggtgatttgcccgcctcagcctcccaaagtgctgggattacaggcgtgagccaccatgcccggctaatttttttgtattttttagtagaaacggggtgtctccatgttggtcaggctggtctcgaactcccgacctcaggtgatccgcccacctcagcctcccaaagtgctaggattacaggcgtgagccatcatgtccggcctgtttttatttttaaggctcccaattaattgtgaaatatgcaaacagaacagtgcataaagcctggtgctttaggctttgtaacctatctttgttctctaagctttggttcatcccaaggtctgagcattgctgaaagaaaacagaggttggcgttactggagttggtaactgctcattctgagtctttgcacatgctgttctccacctgtaacagccttctcccctttccaggctggtcctccagttcttgcctcttccaggaaaatttctttgcacctattctgagcagaattaggagcccttctccaatctgaatcctccttccctatgtatagatagaagaatcgggctgggtgcaatggcttatgtctgtaatcccagcactttgggaggctgaggtgggcagatcacctgaggtcaggagtacaagaccagcctggccaacatgatgaaaacttgtctctactaaaaatacaaaattagccgggtgtggtggcacatgcctgtgatcccagctacttgggaggctgaggcaagagaatcgcttgaacctggaaggcagaggttgcagtgagcctggatggcgccattgcactccagcctgggcaacaggagtgatactccatctcaaaaaaaaaaaaagaagaagaattggctgggcgctgtggctcacacctgtaatcccagcactttgggacgctgaggtgggcagatcatttgaagtcaggagtttgagactagcctagccaacaggctactacctgtctctactgaaaatacaaaaattagccgggtgtggtggtgcaggcctgtaatcccagctacttgggaggctgaagcgggagaattgcttgaactcaggaagcggaggttgcagtgagcagagatcacaccactgcactccagcctggttgacagagcgaaacaccgtctcaaaaacaaaacaaaacacaagaagaatctatctcaccacaaagcactatgtattataatttctgattttttttttttttttttttttttaggcagcgtcttgctctgttgcctaggcttgaatgcagtgtggtgatcacaggctcactgcagcctcgacctcccaggatccattgatcctcccacctgagcctccagagtagctgggacttcaggtgcatgccaccacgcttggctgattttaaaatttttttgtggagtttgaatcttgccatgctgtctctccttggcctcccaaagtgctgggattacaggcatgagccaccacatctggcctataacttcttatttttgtagtcttctcctccatgagtttgtgagattctcaaagcagcttgatctcccaacatcattatttagttcaataaagttgtcatacatttgtaaaactcaggccttgaagtacaattattttgtttgttttgtttttggacaggagagtcataatttctatctgtgataatgagattgcttcacatattaaaacagttgctttaagatacatattacatctccggagccatttctcttacaggatggagattcttttttctttttaccctctggccttttgctgtcaaggcttaatctgacccagataaccttggccagctttttcctcagtgagaagagtggatgctagcaggttacctggcccaatgtcagttttttgggagctgtcttgggagggtagatgagttgtactttagagggccttgctcctctaaaatagagttatctcctgtaacttcctgtgtctccagaattaggtccaaactttctaggctggctttttttttttccccacctggagacagaatctcactctgtcgcccaggctggagtgccgtggtgtgatctcagctcactgcaacctctgcctccctggttcaagcgattctcctgccttagcctcctgagtagctgggattacagacgcatgccaccatgccctgctaatttttgtatttttagtagagatggggtttcaccatattggccaggctggtctcgaactcctgacctcaagtgatccgcccaccttggcctcccaaagtgctgggattacagagccatcatgccactgcacccggcctagaggcttttcctgatttggttttctacactgatctcatcccccatactaatgtcctcactccagaccaaaatggcctgcaggtaatgctgataccaattaattgacataatttaataactgactttagacgaaaggactcagaaatcacatttattgagcacatactatgtgctaggcgcagtctgataactttatacacttcccatttaattctaacagaatttgaacccagacatactggcttcgccgtttattatttagcctaatgaaaagttaatgtctttgtggataaaacagaggtggctgggtgtggtggctcacgcttgtaatcccagcactttaggaggccaaggtgggcggatcacgaggtcaggagtttgagaccagcctggccaatatggtgaaaccctgtctctactaaaaatacaaaaattagccgggcatggtggtgtgtgcctggaatcccatctactcaggaggctgaggcaggagaatggcttgaacccaggaggcggaggttgcagtgagccgagatcacacaattccactccagcctgggcgacagagtgtctctgtttcttcgttttttaaaaagaatataaataaataaaatacaggtaacagatgttgcatcaaagcacttataaatatctttagttgattatctatgcttgacatcagctcaccataatgttcatattactgctgtcgctataatcatttgttacatggttttttattctttattgttgcctctttttttttctttttcttttcttttttttttttttttgagttggagtcttgctcttttgcccaggctggagtgcaatggtgccatctcggctcattgcaacgtccacctcctgggttcaagcaattctcctgcctgagcctctcgagtagttgggattataggtgtccgccaccatgcccagctaatttttgtatttttagtagagacggggtttcaccatgttggccaggctgttctccaactcctgacctcgtgatttgccgacctcagccttccgaagtgctggaattacaggcacgagccaccgcgcctggcttttcttgcctttttttgctcaaactctgttttttttttttctttgagacagagtcttgctctatcacccaggcgggagtgcagtggcacgatctcagctcactgcaacctccacctcctgggttcaaccaattctcctgctccatcctcccaagtagctgggattacaggcgcgcgccaccacgcccaactaatttttgcatttttagtagagacggggtttcaccacgttggtcaggctagtctcagactcttgacctcgtgatccgcccacctcggcctcccaaagtgctgggattacaggcatgagccaccacaactggccttgctcaaactcttttgccaaggtaactcctcatctttcatggtaagtgtcatttctgggaagcttttccacactacctaggagaggtcatgtctcttgtggtgtgctcttggagcagtactcgagaccgaagtattgaaatgcctctagacctgctgataaacagctcctgccccagcttccccacccattcttccctgaacgtcttactgggtttcagcaactaactgggtgagatttggcctagagggacctctaggcccctgctccacacagtggaagtaccatcagcccaccacataatgtccctgcctagcattgagcctgatttgtaatttaacaaggatttgtgtcattagttgtgtcccctttgcctcccctgccagtctggaaactttaagaggtcagaagctgtgtctagttttcgtttttatctcttagagatggagtttcactctgtttcccaggcctggagtgcagtggcgtgatctttgctcactgcagcctcgaactcctgggctcaagcgatcctcctgccccagccttcccagtagctggaactaaaggcacgtaccaccatgatcagattgtgtctttttttcaccagggcctgattggtcagggaaaatatttgttgaatacttgaataaatgatacccagacaaaaaaagtcagcttgaaatctggatctacctctgacactgagtgagtcaattggcctctttgtccctcagtttctttctgctgtaaagtggtgcagttcctctttttttcttttttagacgaagtctgactgcaacctctgcctcccaggttcaagtgattctcctgcctcagcctcccaagtagctgggattacaggcgcccaccaccatgcccggctaagttttgcatttttagtagagatggggtttcgccatgttggacaggctggtttccaactcctgacctcaggtaattcatccgccttggcctcccaaagtgttgggattacaggtgtgagccaccacgcccagcccagttcctccttcagccaaggctctcttgagaatgtaagggccaggtgtggtggctcacgcctgtaatcccagcactttgggaggccgatgcgggtggatctctcgagcccaggagaccagcccagcctgggcaacatggcaagaccccatctcttaaaaaaaaaaaaaaaaaaaagagggagtgggcaagagagaatgtatgtacagccattgggaaacaacccggaacaggactcaggaggtccttgctcctgtggactttacaggagacagacagtaaaggcacaagatgccttcttatggtactaagaagaaaatatgccgcatgatattgcagatgggggggcgggggcgtcacagaacgtgactttttttttttttttttgagacagagtcttgctctgtcgcccagactggagtgcagtggtgcagtctcgcctcactgccacctccgtctcctgggttcaagtgattctcctgcctcagcttcccaagtagctggaattacaggcgcccaccaccacgccaggctaatttttgtatttttagtagagatggggtttcactatgttggccaggctggtctcaaactcctgacctcaggtgatcctcccacctgggcctcccaaagtgctgggattaaaggcgtgagccactgcacccggcccagaaagttgacttctaagcgtttccccaaagtgtctattaggtatctttatgattcaataacccattcttacagaaattaattgtaagcctgggagcggtggctcacgcctgttatcccagcgctttgggaggctaaggcgggaggatcgcttgaggccaagagttcgagaccaccctgggcaacacagcgagacctccatacatctctaagcaaaaaaaaaaaaaaattcattgtaaaagcaattttctttttggttactgccatagggattttgtaactgagtcacaccgggccgaggcgggacctcattggctgcgaccgaccacgtgccgcagtcgccccggcggtcggggccccgcccctcggctaccgttctgtggatcaggggccgagctccgcccccggcgcgcggctgagaccctctctataaaaggagccggcggaggatggcgagcctttacgtcggcgcgtaacgagggggtgcgtgtgaggtcatcgcgcgggcgggcgggcggggtctggcggtttgaacgagacgaagacggaaccggagccggttgcgggcagtggacgcggttctgccgagagccggtgagccggctagcgggcccggggggtgcggctgggggggcggccgcgtgggccaaggccgggcgtgcgcgggcaggccctacgggcagcgccagggccgttccacacggcggtgctgttcgagccgggtgggggaagggcggggccgtcacccggcgcgcgcgggctgggcctgggggcgcgcgctgcgctctgctcagggggcggggtctcgggccggaagtgggctgctgctacgcggggtgggggtttctgggccgccgctgaggtgtggtccctgcgctgcagcgactggaggtcccagggtggttgggccctgggagggtgtgggcgaggtgggccgtcctgggagctctggggacgcacattgtgggaggccgtgttgcctgagggccgagagatcgggtggtggagtcagacctgggttgggttccgtgcggtgtgaccttggacaggtgctttaaccgctgtggatctcagcttcctcatctgtaaaacggggacagtaatactacccacattaaactcttagcgcgatgtatggcagaaagtaagccagctcttggactccctcctttcttcagtgtgtgtttattgaatgcccactaggtgttgggcaccgtgctaaaccctggctgttttcccgggaacaaagatttgctctccaggaatccacattatgatgagcaggaggacagtataacgggatggtatcaacagtgctagttcagtccctacttcacagttgccctcggatgctgcagggcagagcttgacctctgccccattttggggatgaggatcctggggcccattgagggaggttatgctaggccgggcatccgcttctccgatggcatgtctctaacagtagtaatgataatagcagctctttgttagttgggcacttgttttgtgtcaagcactgttaagtgctccatgtggctttgtgtcttttaatactaacactgtctttaagagagattctcttcttccttttttttttttttttgagacagagttttattctgttgcccaggcgtgcagtggcaccatcgctcactgcaacctccgcctcccgggttcaagcgattctcgtgcctcagcctcccgagtagtcgggattacaggcgcgcgccaccaagcccggctaattgttgtattttttagtagagacgaggtttcgccatgttggccaggctgttgtcgaactcctgacctcaagtgatctgtccgcctcggcctccaaagtgttgggattacaggtgtgagccaccgcgcctggcaagagagattactttcattttacaaataaggggtctgagactctgagaggcggagtgtcttatgcagcccagcaagtggctgaacccccacctgggacttcagtgtctaggctcttaacctctttattacactttctccctgaggtccagagctacacatccagatgtgccctttgtggtggtgcgtcaaagtgcctagcacagtttttggcacagagggaagcttaggacgtgatgtgccttttgcttaagtgttttcatgtagatttttgtttaatccttaccaccactttgtgcagagatactgttttacccattttacaggatgagccatttgtgatgcaggaagattaagtgacttgcccacggtcacataggtcctttctggtggcacctccttcccccactttacatagggcttattgtggtgccttgaaagtaatagagtgctttagagccagcgttgaatttgtataggtttgggatcttgctaggagagctgctgaaggaagagagattcctgggtaggtttgagggagctttttcatggtggtggtggaaacctggatcaggaagccttgtaagggtgagatttgtgtggtagtcatgggtcttccatggctgccaatgatggaattgtgaaggaagggtgagctggagctctgttttgattgtcaggaggagccaattaattgattgagtcggtggatgttcattgtacatccacagggtgcctaatccatgtatttagtggctgcagcgtttgtggagcacgtgggaccaggtattaatgtactgctaatgaaagttttaaattatatgatgatgaaaggccattaatgttttttgagctggggtgtggtcaggagacacacatggctttaccagctgcttagattttatagcagcatgatgcacacgatacagtatatataggaatgtcgccataatagattacaattgctcagctgggaccatgtcttttttgtttgaatgtctctggtacctgattttgcgcacagtattttgttcattcaaggattttaaacaagggaggcacttgctgtgatttgtgattcaggaaattctctctggtttgctgtgtaagaacagattgacacagacaaatttgaagactgttgcagtgcatctccgtgcaagatggtgctggcaggtctcaggcgcactgtttttggcattggagataggaggatgagtgagacaaggtccctaccctacatcttgtttgttaaatacctcttaaatttgatgccatgccaaatattttatgtaccttatctaatttaaacccttctatgacccttttcagataggtggctttaacttgtaagggaactgaggtacattgagtttaagtaacttgcctaagatcacacaactaatgagtgactgcctcacattcaaacccatgtcctcctggcttgaaatcctcagctgtttgcatcgagtggattgcttcctggcccaaatctggctcgagaatggttcagaaataacgagataatgacaattcattgtgggacttcctatcataaaggtttgaatgaattgctctggaaacatagggattaatttcccagtggagtcagtaactaaattgtgttggtgtcttgcataacatggttttatcagctgatttggggagtgtaacagtgttgatgatttgctttctgacaagtttatatagacacatttttctctctttgacgctgttctgccaacctgaaaataagtagtgagtgcttgctatgtgcaagatactatgaggtgcctgggagatgtgagggcacgcagacctggcaagttattgacctctacagacctcagtcaccccataaaaaggggactggatgggtggatttgcctcttctggctgtcacattctgtggcttggtgagtcaggaggcttgcagcagcttagtgcaggagactgatgtggaaagaccaactctagtcactaggtggagggaacgaagtaccgtaagagagcaaggggctgggatctcaggattgttccagattgctctgcatctttcccctgcccctccccactggtaatgttgctgtcttatgaaatgaagaaaattgttaagtgtctaggtcactatgaagtctctggtatttcatagtgtgtcctcatggtgactgctcagggatttgatttagatctggattagcctgcctttatcttgagtcttccctccctactgtctgttctctactagtagtcaatgtgatctttttcaaactgtaatgagagcaagattctaccgcacttaaaacctgaaagtgcctgggtgtggtggctcatgcctgtaatcccagcaccttgggaggctgaggcggaggattgtttgaggctgggccgcaaaatgagacctggtctctacaaaaaattaaaaaattagctgggcttggtggtgaccatctgtagtcccagctacttgggaagatgagtcaagaggatggcttgagcctgggaagtcagggctgcagtgagccgtgattgtggcattgcactccagcctgggtgacagagtgacaccctgcctcaaaaaacaaacccaacagtggatttcttaatagaataaaatcctaactccttctgttcccacctcaggctctgctctccttgctcactgggctggagagccctatctctagagcttcatgtggttgcttctttctctgatccttaagctcaactgttcatctcagagaggcttcctctgaccacattccgtaaaccccgttgcataagtggttggtatgaaatgatgtttgttggtgtatttggtcagtgtcagactttgcaccactagaatgtgaactccctgtggacaggcaccttgtctcttgcttttctgtatcctggtccctagaacagtgcctagcacgcggtagagctagtaaacatttgtagaatgagtgacggttgactacactggtgctcatagacaataacgcccacatttactagcatttgaaaattagactcattgctgtgtgtttattgttttgaatttgaaagcctagcagaaaagggagggaagagaatgtggaggctggggctgggcaggcttgcctgccaaccccagggcctctcttgtcctcacctgtaaaatgagggacatgaagtgaaccttgcagagggctgtcagggttaaacaacaagtgtctgtgaagtatctggcacttaggcccacagatgccctaccattgccaggtagctctgcagagaattaactacaaggattcttcacctgtaaggtcatttgatactgcctttttaatatctaggtattgaaaagctgatttactttttcaattatgaaagaatttatagttttttttttttttttggaaataggatctcactgcctcaacctcttggactcaggcgctcctcccacgtcagcctcccaaagtgctggtattacaggcatgtgccagtgtgcctggcctaggtatagtctttaaggaaaatttgggaagtagtgaaaactataaataggaattaataaaaacccatcgggccaggcgtggtggctcacgcctgtaatcccagcactttgggaggcctaggtgggtggatcacctgaggtcaggagttctagaccagcctggctaacatgctgaaatcctgtctctactaaaaatacaaaaattagccaggcatggtggcatgcgcctgtaatcccaggtacttgagaagctgaggcaggaaaatcacttgaacctgggaggcggaggttgcagtgagttgagatcgtgccattgcactccagtctgggcaccagagcaagactgtctcaaaaaaaaaaaaaaaagaaagaaacaaacaaacaaaaaaccattatctgaagaaaattgtaacattttgatatctttatgggtaactttgggctgatgttttctaaacagaaagcattctcgtttatgcatctgcctcccatcataaaagcacttactcatccctttatttagtgcctcttatagtttagaattgtatattaatcacattaaaatggggcctcaattttagtctggctggtgttgggcagttcatttcaggtcatgtttgtatgtggaaatccagattctgtggctggaatcttagtgtctctcgtttggcctcatggggaagaaggtgaggcttaaaaagtcaatgtacctaggctgggcgcagtggctcacacctgtaatcccagaactttgggaggccaaggtgagtggatcacctgaggccagtagttcaagaccagcctggccaacatggtgaaaccccatctctactaaaaatacaaaaattagctgggtgtggtggtacacgcctgtaatcccagctactcgggaggctgaggcaggagaattacttgaacttgggaggttgcagttgagtcgaggtcgtgccactgcactccagcctgggcgacagagtgagactctgtctcaaaataaaataaaataaaataaaataaaattgagtgttcctacaggtttgcttttggtgactctctaggaaacacttgaccttacttgcatgcctaatgtaacacaggcccttctcttttcttcccatgctttagaagatggcagtgaacgtatactcaacgtcagtgaccagtgataacctaagtcgacatgacatgctggcctggatcaatgagtctctgcagttgaatctgacaaagatcgaacagttgtgctcaggtaagagaaatctgctggatcatttttctaggaaagcctgtaggtttttcaggaatgtgaaggcctgtatctgactgcaaagccacacacagaggttcagggtctttgttagggccaccctgtttcttcctctcagccctgcctttgcttctgcttccaaaggaacttttttttttttttttttttttgacagagtctcgctctgttgcccaggctggagtgcagtggcgcgatctcggctcacttcaagctccgcttcccgggttcacaccattctcctgcctcagtctcctgagtagctgggactacaggcgcctgccaccacgcctggctaatttttttgtattttttttagtggagatggggtttcaccgtgttagccaggatggtcttgatctcctgacctcatgatctgcctgcctcggtctcccaacgtgctgagattacaggtgtgagccaccacgcccggcctttttttttttttttttttttttttgagatggggtctggcgctattgcccaggctggagtgcagtggtgcagtcttggctcactgcaaccttcgcctcccgggttcaagcgattctcctactttagcctccaaagtacctgggactacaggcgtgcatcaccacacctggctaatttttttgtatttttagtggagacggggtttcaccatgaggtcgaactcgtgacctcaaatgatctgcctgcctcagcctcccaaagtgctgggattacaggcatgagccaccatgcctggttggaactatacttaaataaagagtgtgctctggcctgcaggtccaccatcttctgctctagagactgcattctgaggcctgaagctcagccccgacttcttggtgtctattattgtgcatccagattgcatgttttatttgaggacagtaattgtattaactactgtctgctgttctagttttatgttcatcagtggcatttcttattcccaagaagtacaagatcaaagtctagcaaatatcatttcagccacaattttatggaactactgtttaacaataatttggcaaagatgtaatgatttaaagtctcggtgtggtggctcacgcctataatcccagcactttgggaggctgaggcaggcagatcacctgaggtcaggagttcaagaccagcttggccgacatggtgaaaccccgtctctactaaaagtacaaaaaaattagccgggggtggtggcaggcgcctgtaatcccagctgctctggaggctgaggcaggagaaacgcttgagcccgggaggtggaggttacagtgagccaagatcgcaccactgcactccagcctgggtgataagagcgagactccgtctcaaaaaaatgaaaaataagtagtgatttaaaagaagaacaaaaacatggtctctttctatgtatgctaatcgtatgacgtgggaaactagaaagaagaaaacaaaaaaatgccttataattccactattcaagccggctactgttcactcactaatcatgagccactgtgcctgccctggatcgatcttaaattactgccattgcttggccgggtgtggtggctcgtgcctgtaatctcagcactttgggaggccgaggcgggtggatcatgaggtcaggagtttgagaccagcctggccaacatagtgaagccccgtctctgctaaaaatacaaaaaattagccaggcttggtggcacgcacctgtagtccagctacccgggaggctgaggcaggagaatcgcttgaacctgggaggtggaggttgcagtgagccgagatcatgccactgcactccagcctgggtgacagagcgaggctctgtctcaaaaaaaaaaaaaatttattgccgttgcttataggattttttcttttttttttttgagttcagcttctgcccttccttattttatagctgggtcctagtctcggtcttagtttcattgacttgtcttgttatttccttggtgaggtgtatttaatcttggttttacggatggtcagatggaggctacgtgtgaagctgtacagtaacacagtggtgcccaagagttgtgtttattcagcattaattactttgctgatcatagacaacaggctgttagccttagatctgtgctgtgtcccccccaccattttctattagtttcctcattattcatttccctatccccatttgtgtgaggcttttaaagcacttgtttgacctgtgttctgtgactaatgtgaggatgaggtcatcctagttttcactggagccagctttttaccagcaattccctctaaaatttacctttttctgtaaatatattccaaagtctatttcacttagttaattggaaaatgtgatctttaatgtttagataagttgtatatgtgctgatcgggctctaggtttatctcattcaggcagagagctgttgtagacaggactgggcataaagaggcttcagtctgctctgagccatgtgacttttgacaagacccttaatgtcttagttcttcatctgtgaactggggcagcgatacctggcccacttgttggccagtgtgagaatcacctataataacagctttcagataactgactgtgtgccagaccctggaaatgagtgcaggtcatttgatgggggcacatcctccttttacagatgaggagactaaccctggggcacagcttatgtattacagaacctggttttgaaccagatctttctgagcacacagcccacatgcatcctgctgcatacttgttatatcttttatagaaacatttggaggggattaaacaaatgtaaattacaaatgtaaattacatatagttaattatagtgatactgtttcactataaagtctgtgaggtttgtcagttgttttttttttctttttgagactggaggctggagtgcagtggcgtgatctcggctcactgcaacctccgcctcccaggttcaagcgattctcctgcctcagactcctgaggagctgggattacaggtgcgtgccacctgtaatttttgtatttttactagagacggggtttcaccgtggtggtcaggctggtcttgaactcctgaccttgtgatccgcccacctcggcctcccaaagtgctaggattacaggtgtgagccaccgcgcctgggtggtatgtcagttttgtctcatgtctgctacttttcccaaataaagtgctttttctccctagaaaagggtaagtgcaggacacttaactgtgatttgtaaacaaacttgttcattcataactagtcttcttgaaagccgtataagatgtctcttggagtatgtagatggttgcattgtgtttcacattggtgtttagaaaatgaggtcttgcttccagtatgagagcagacaggatgagacacagacattgtctctctgaagaaggcccgctgccaggggtttggagtcagagaaagtgaggctcctcaactccttgtgcttactgaggcccaaggagaattccaggagcttttgatgctggtgccagatccttcctaacctcatctctgatgagcagaggatctagcagaccagagttctccactaaacacagctttacaaagtaggaatacatttcttccttgagagggcaaagtgctgaggtcctttgttaatctgcctgctgcctgtgaagtggccaaattttgtcagcagtgggctctcctacccccaacagtgagctgagcctttgcttggctctggtagagggagattaggcaaggataactttcagtgaaagatttggcaggttgtttcaagattcattaatacattctgtagtctccgtagtttggagagctagtcatcaagtattttggaaagatagtcatcatgaggaaaaacctggtcaaagagaatgatttttatgagagcttttttttgtcagaaagggagtactggttgcttttgtgaattgttcctgtgttgcattccatattcaggcccctctgcattttctcaagagcacagcttggtcctctgcacatgtagaggggtctcactgaatgtattcggctctccccttctcctccttgtcttctccctccagcctggcttcctttatgggttccttcgcagcaaaggtgttgatgttcccaggcaaatggtagattcctttctcctcagcttaatgtggggccccgacagcccttgagttcatgtaagacagcttggcgatcttgcttctgctgcactgctaatgacatggtcctcctgctctgggagtgtgttatcacacctgtaaccaggcctctcccagctcagatctggtctgatatttctgtttatgggatacttttgccctacctgtcattacttaaaatctcagctttgttttctcctcaggctagctcccttttccaggtactccatttggggccatgattccatctttcttccagtgtcccaggcctgagaagcatcttttgaggctaattcacagttttatttgtcttctgaaagagcttctagatccagccccttctcagattgctcactgctgctgcagtggcctcctgactgaacactaagttccctctaagttcccagcccccaccttcccttttgttatattgcataagtctgcagcctttctgagggactggttttatcaagtcacatttctgatcaaggaagtatctcttcaaactttttttttttttttgaggcggagtctcgctctgttgcccaggctggagatctccgctcactgcaagctccacctcccaggttctcaccattctctgcctcagcctcccaagtagctgggactacaggcgcccgccaccacacccggctaatttttttgtatttttagtagagacggggtttcaccgtgtttgccaggatggtctcgatctcctgacctcgtgatccgcctgcgtcggcctcccaaagtgctgggattacaggtgtgagccaccgcgcccagcctcttcaaacatttttgcctaagtcttcaagcacctccttgatttttcccttgctttacataaagcaaaccaaaacagaagataggaagctcattttcttctgattatgaatagttaggtcttcattaaaaaaaattaaaggccaggtgtggtagttcatgcctgtaatccagcactttgggaggccgaagtgagaggatcacctgagcccaggaatttgagatcagcctgggcaacatgacaaaaccttgtctctaaaaaagaaaaagaaacatgaagagaatcatactcgcataaaagtctatcaggaggactggatgccaatatttatgtaattgattctttctctttttagaaatagggaaataaataagaatgtttctttcttttttttttattcctgtacaattttggtaaccagtttcatgcataagttgttgactttttttttttttaactcctgtgcaattttggtaaccagtttcattcataagtcattgtctcttttttgttgttttttttttgagacggagtcttgctctgtctcccaggctggagtgcaatgaatggtgcgatctcagctcactgcaaccatcgcctctcgggttaaagcgattctcctgcctcgggttcccaagcagctgggactacaggcatacgccaccacgcctggccaatttttttgtatttttaatagagacgggatttcatcatgttggtcaggctggtctcgatctcctgacttcaggtgatctgcccgccttggccttccaaagtgttgggattacaggtgtgagccaccgcgcttggccaatttttcttttttttaattgtgtaaaatagtactgggtaaaataccactgtggatatagttgctgaatagattgtcttctatttgggtttttaaaaaaagttcgtccgtttcaaaaaaaaaaaaaaaaacaaaagaatgccctcagtgtacttttgttggatgagtaaataaatcagtcacctcagaaatcaaggccttaaccttctgaagatcctttcttaattaagaatgtcaccctggtcactgaagtgcccctgctctcgtttatgttgactttccaaaaataacggtaaccgaacatgctggaaccagcagagaactggttcggcctgacctcaagtaagttgaatatgcattttatggcagtcttgaattctgcagattacttattacttaaccactggtttagcttcccaagcttgttcctttggcaaattagccctggaagggcagtaaagtacacagtgaagcctgctgtgaattaggagagttcagtttgtcggcattagagaaataatcttcctggaaagtttaagcagtaataaaacactttttggaaaaaaaaaatgggcaagtgggggaaggaatgaaatgggatgaaatattgcaataatttattacagtagtctcttttttttttttttttttgagacgaggtctctctctgtcccccaggctggagtgcagtgatgtgatcatggctcactgcagtccttgacctcttgggctcaagtgatcctccttcttcagcctcctgagtaactggaaccacaagggcatgccaacacgccaagctaattttggtattttttgtagagacagggtttcaccatgttgcccaggctgttctcgaactgctggactcaagtgatccacctgcttccctaagtgttgagattacaggcgtgagctacggtgcctggccttatcatagtagtctttatttatttatttttgagccagagtttcgcttttttttttttttttttttttttgagacagtgcagtggcctgagagaatcgcttgaactcaggaagtagaggttgcggtgagccgagatcacgccactgcactccagcttggcaacagagcgagactctgtctcaaaaaaaataaataaataaaaaattaatagaggaacacaaaaatgtcttctattcaactttgttaattaaatgacgggttggctgggtgctctacaaaaagaataaaaaactagttgggcgttggtggcacgtgcctatagtcccgctactccagaggctgaggtgggaggatcacttgagcctgggaggcagaagttgcagtgagctgagattgtgccactgcactccagcctgggcgacagtgagaccctgtttcgaaaagaaaagaaaagaaatgataggttaaatgtatttagagatgtaaaaagcccagggagacagacgtcttagggaaaaaaatgttttttaatctagatcaaggatggatcttggaaattgcctcctgaagaggagggtatatctttgtgaaaaatcagaaaatgtcacttttgttattttcttttctgtattttaggcattcatttttgtttctagtggtcattttattgtcatgatgattaccaataaagaacaggagttttaaaattttgtagaaacactccttttctccttgttataggcttctgggttgcaagtatgttgtagaatatatggggtgaaaaccacagtcttgttacaggttttagaaattgacttcacatgaagttagtgaagcttttggtttttgtaggtctacttcacaattttaaaaattgtatttggtttaagtgggtctgggaagaagttcaccctgcttctttaattgtatttttctgttgccgttgttctttcaggggctgcgtattgtcagtttatggacatgctgttccctggctccattgccttgaagaaagtgaaattccaagctaagctagaacacgagtacatccagaacttcaaaatactacaagcaggttttaagagaatgggtgttgacaaagtaagtaaacgttatcttttattgtggttaatgttccttaatgatcgttactaaggaggtagatgctagcttatgactttggacattttcttttttttcttaatttatctagttaacttttctcagttaacacagaatttactgggagcagtttgcccctaccttcttgcccctattccccttgcttgtttctttcttcatcgtctgtgaagttagtaactgtttagaggagtcagcctgtaaatttgtacagtgatttttatttttaaaaaattcctgtgtaatctctagtagtctggaatctaactctcttaatctggatttacttctgtaaaagcatactgtatgtagaatagttccagtagagaagattctaggccaggcgtggtggctcacacccgtaatcccagcactttggaggctgaggtggagaagattctagaaatacttgctttttatagaaggttacaaggaggctccgtggtgggtgctggaaaactcctttctgcccccaaaggtttttgaaggtaacagaaacatggtccaccaggcatggtttagcacaaacatttaatgtttagcacaaatattacctctgttttagtagataatagattaagtagtttatcccttcccccacccttgtgaagggtttatccttttaagccatttttggggggataactttttttttttatggcaaaggtagtaacacccccaattatcttgctggtgtctggtttttatttattttgaaatcagggtttttttttaattttagttttgtctctacaatatataaaataggcatttatagtataagaatatcacttaactttccaggcatagtttaaatagagttcatatacagtaattttgcattcattattatggaattttattttttgaatatggaaaatgtctaaagtatataaaagtaataatagtgtataaacaataaatagtaaatagtgtaatgatccctcatgtaactcaatggttagcatggccaattttgttttatatctaattctatcctatcctatgtattctgggttattgaagtgagtacagaggtaatatttgtgaatgtttcagtatcaagcaaagtaacttttaaaaattatatttgtcagaggggtggatatattattggatatattctttttataatacattgcaactggaatctttggagattaaaagatagttaaaagccaggcatggtggctcatgcctgtagtcctagctactctggaggttgaggcaggagcatcatttgaactcaggagtttgaggcagcagtgagctatgattgcagcataagactccagcctgggcaacagagcaagaccccatctctaaaaaagattaaaaagttaagttgtggccaacacttcagtgatttgaatacttgaaaacacagtattcttgtataatagaaatacttacagggtccttatgtatatttgttattttttgtgtgtgtgtttttattggtgttttttttttttttttgagatgaggtcttgctgtgttgccagtgctggtctaaattcctggactcaagcagtcctcaagatagctaggattgcaggtgggcagccctgcccccagcaagcatgttttaataggatttggaattacttggaaaacatgtcattttgtaaaaatttatcctgagactgattctgcatcttgatctattttcaggttagaattattcttttttcttttcttttcttttctttctttttttttgagacagagtctcactctgttgcccaggctggagtgcagtggtgcaatctcagctcactgcaacctccacctcccgggttcaagtgattctcgtgcctcagcctcctgagtagctgggattacagacgcccgccaccacacccggctaatttttgtatttttagtagagacagggtttcaccatattggccaggctggtctcgaactcctgacctcaagtgatctacctgccttgacctcccaaagtgttgggattacaggtgtgagccaccacgcccggcccagaattttcttgaacacagttcattgtagatgcctttggttggtttgtgcaatggatttttcttcccttttcttaaatggggtctctctctgtcacccaggctggagtgcagtggcacagtctcgactcactgcaacctctgtctcctgggctcaagcagtccaatctcagcctcccaaggagctgggaccataggcgcatgccaccacacctgcctaatttttttgtatttttggtagagcctaggtgtcaccatgttgcccaggctggtctcaaactcttgcccgccttggcctcccaaagtgctgggtttacaggcatgagccactgtgcctggcctgtgcagtggatttcatgctttgtgataggcattgtggccatgcaagttatatagcggacctactctttatagcataatgcacttttgtatcacgtcttacgatgtgcttggatggatgtgtgtatgtgacttatatggtacttgttccttttttgtttctgattccttttcatacatttgagagagtggggaggggttgggaagtgtaggtactcttgaaggcaaactgcatgaaacttgctttataaatttaggggcttagccctaaggtctctaaaatatttttttctccttttggcagagctttataatgaattgatgcatggactagtttgatgcttgccaaaagcctcttttttggggctaaacagttgtttttctctgcagataattcctgtggacaaattagtaaaaggaaagtttcaggacaattttgaattcgttcagtggttcaagaagtttttcgatgcaaactatgatggaaaagactatgaccctgtggctgccagacaaggtcaagaaactgcagtggctccttcccttgttgctccagctctgaataaaccgaagaaacctctcacttctagcagtgcaggtaaaaaaacaaccccaaaacgtttccaaaaaatagcgttccagatattcattcagcgttcaactagaatttttttcagtagccataggcttagggatcttaagaaatataatcccaggcatgtggccagagtatggattttggcatcaggcagataacggtgtgtgtccttaggtgtctgtagccctgtgtaagcaacttcaactctgccccacagtttcctcctctataaaatgggaattttaatacttgccccagagggtttttgaaacttgaacaagttactgtatgcagttttgccaaagctctagaaatccatcaggctagctcatgtaagagagcattagtttgttccaaaacaagggcatttttacagagccctaggatgggaagttataccagagctgaactccttgaaggaagtgtgtaggtctctcagggactgctcttggctgtctgtgttattctctctgtagaccagcttcctgtgtatactcacagcttccctacctgccctagaactttagctgctaggtgactttggcttgccatggtgctagcagagtcaggggcgggggtaggggagaggctgattttacataccttctcaaaagggtatgggcttggtagctttcccaagatgtgtttacattagtatagaatgtgtatattttggggcagggtagatactctacagatgctaatttcttcttttccagaggatggcaagaatattagttaaggtttcataatacctagagagaggcttgttcatctgatagagagggtaggttgagtgctttctaaatagcttaatggagagacaattcgcatgccatataattatatttttatatttaaagtataaagttaaacggtttttaatatatccaaagaattgtgtaactatcaccacaatcaattttagaacattttcatcactctgaaaagaaaccctgtgctgggcgcagtggctcatgcctgtaaatcccagcgctttgggaggctgaggcaggcagatcacttgaggtcaggagtttgagaccagtctggccaacatggtgaaaacccatctctactgaaatacaaaaattatctgggcatggtggtgcatgcctgtaatcccagctactcaggaggctgaggcaggagaatcgcttgaacccaggaggtggaggttgcagtgagccaagatcgcaccactacactgcagcctgggtgagagagacagacgctgtctcaagaaaaaaaatagaaagaaaccttgtacatagttaatagttgtcacttcccactttccccagctttaccccctccctccagccctaagcaaccacttatctgctttctgtctctggatttgccagttctaaacttttcctatacatggagtcatagagtatgtgatcttttgtgtctggcttcttttgctcagcctgctgttttcaaggttcatccatgccctagcatgtatcagtccttcattcttttttattgtggaataatattccattgcatgcctatacctcatttgattcagcagttcatggtcttttgcgttgtttcccactttatggcagataggaataatgctgctgtgaacgttcatatacggcttctgtgtggacctacaagttttgatttctctcagttacagacccaagagtatatactctgggagcagaattgctaattgctgtgccatgtgttaactctgtatttaaccttttgcagaactacctgttttccaaagtgcctcagctctttacattcccatcagcagggttcccgtttctctagatattgagtactttttattctttacctgtttagaatgggaaactacatagataaccccgtgcatttcatatttcagatgctgctaccagttgagtggagacgtgcattaagcatttagtctttgggataaacgtgctagagagagtcatccagaggaaatgcctattactgtgggtgacaggccttgtgattatagtttggggtgttaggaagatgagatattttcaaacctggcatgtaatatgcaaactttacaaaataattgctaagtaggtgaatcatcagtgatatatataccttgaggtttagcccattcttgattaattttacttgtagataggttggctcctttactccttttttcttgtctttgtctgcttttggctgtaaatactgagagacgtctataaatactagtcagtgtgatgcttttctctcctcactcttctaaactccttctaaaaggtaagcagagatgaagattttaaagcaattcatgggaagagcaggctctcctgctcttatggattccctccctcttccactccaaggagtctgaggtgaggagttaggagggacctaactttccagatggggagcagtgggcacctggcaacagccgagactgtgtgctcatgtctagcgtgaagtttgcctttgctctacgaagctggatttggtttgtagatgtgttaactaaatcttagctgttgtaaccaacatgaaacaacctgtttgtggatttggtcagagctgggttaaggtggatcatctctgtgcaccagaatgactgtacccctttcagatggtagtcctgttcaccgcagtggagaaaagacctcactgaaggacttattcccagcatgaaacatcatgacagaaattggtacttaactctgctgccaggatagaaaccactcagtaggcaaatgtgggagcgttgtcttgcatgcgggggctctctagcattggttcccttcactgaacacctgtgcaaggcagatggtcacagcttctccatgttgtcttgtggattttttgtttgtttgggctggaattactccttttcaaaaacctgtgctctctttttcagctccccagaggcccatctcaacacagagaaccgctgcggctcctaaggctggccctggtgtggtgcgaaagaaccctggtgtgggcaacggagacgacgaggcagctgagttgatgcagcaggtgggcacccctgtgtttagcacgtgagtcacctcgggggataggatccttgcggtggccagggtgccttatccgtgttcttaaatgaacacctgccttgtttgcttgccagagcatgtgacacgtgtgagcctcaggtgctgtgcggggagcatgaacgtggagatgtaagagagagatcaggtgtgcctgggctctcttagtgtggcagaagcctgtgctcggaagccagtgcttagactagaatcctgttgaatgtttctggaatgctgccagggacctgggatttggagaatgaaagataaaggaggtctcctttttgaataatttaataaaaaggattccgcagtctctctgctgagtcctagactggggtcactggagattggaattcagagtggaactggtatgaaaagcctgtggctcttctagttctgttcttagtaattgggtgattcgaaatgtcttcttcaggagtaaatgtccttaaggcacctgtcagaggtctctgtggatcaaaacaagttttagacttttagacattttcccactaatccttgtaattggttggtttgcttgctttcagatgattctttttgttaattctattttttaaattttgttttattaaaaaagtttttttaataaaatagagatagggtctcactatggtgccaaggctggtctctaactcctgagctcaagtgatccccctgcctgagcctcccaaagtgctggagttacaggtgtgagtcaccacgcctggctccattgaaaaaatctgggatgctctgtgattccagtgagtttgggattgcatccttttacttttctaaaagccaagtcctgaaacttgagggaattgatttctaatgcagaacctctcatgacccacactcagacttctaagagatcaggacagtgagaacctgcccaaaaatcacatttcacttttttattttttattttctttttttgagacggagtcttgctgtgtcgcccaggctggagtgcagtggcgtgatctcagctcactgcaacctccgcctcccaggttcaagggattcttccgcctcagcctcccgagtagctgggactacagtcgtgcgccaccacgcctggctgatttttgtatttttagtagagacagggtttcaccatattggccaggctggtctccaactcctgacctcagatgatccacctgccttggcctcccagtgctgggattacaggcatgaaccactgcgcctggcccacatttcactttttcgttctttcatttgtgtgtgccccgtggtcttaggtgccttgggagtgtccaggtgactgggtcaccgtcctcatccttggagtgggtgtggctgacttgagcacccgctggggctgttactttgaagtacagaagcctcggagaacaaggagagacttcctgtaactatttcaagacatggatttcaaacacaggaagcagtttcagaaagaaatacgagagagtaaagagtggttaatgttgaggctgggtagcagcgacttgatctgtgctctccgagagagcgtgccaggttctgcagtgtggctgctctctgctcagctcttttttttttttaattattattattattatactttaagttttagggtacatgtgtacaacgtgcaggttagttacatatgtatacatgtgccatgctggtgcactgcacccactaactcgtcatctagcattaggtatatctcccaatgctatccctcccccctccccccaccgcacaacagtccccagagtgtgatgttccccttcctgtgtccatgtgttctcatccgctcagctcttatcctgggtgatggagcccaggcttggggttccatagattgagggagaagtaggagtgtctctgtcagttaacttctatctggacaagtcagcctctctgaacttactgcctcacgtgtgaagtggggctgacacttgctcacagcagttgagcagattatatgagctgaatgttaagtgcctggaatggtgtttgttgccaataccactgggataaatgtcagtggataaaagactgtgatgattatggttcttgttcatggtcttgatagagtagaataatgttctttaaaagttcacaggaaccagtttttttttttggcttgtgtgaaataatatgcgtaaatggtcataacaaaagtagccaacattttatttatttatttatttatttttatttttatttttttgacacggaatctcactctgtcgcccaggctggagtgcagtggcgcgatctttgctcactgcaagctccgcctcctgggttcacgccattctcctgcttcggcctccccagtagctgggactacaggcacccgccaccacgcctggctaagtttttgtatttttagtagagacgaggtttcaccgtgttagccaggatggtctcgatcttctggccttgtgatccatctgcctcagcctcctaaagtgctagcattacaggcgtgagccacagtgcccagccatagctaacattttaaaagtgcttatgtcatgcacagtgtaagcacttaatttcactttcgcagcaaccctgtgaggttttacacataaggataataaggcttggagaggttaaataacttgagctaggatttgaacccaggtatacctgtctccagaacctagatcagtcagtccctgctgaatggggaattgaggaagaggttatttgatttatctaaggtatacagatgtttcttttccttgcacccacctttggaaactgtaagtactcaccagataatgactctgggcaaattgctgctaagcgttgatgagagtaccaaggcatgggagatctgtcctagacctagacaggtttgatacacttggagaagatggacttggtgcctgcctgtgttcaagtcccagatgagggttacggaaggcaagaaccacaactcttatgggggagagtgtgattggggtctgaggaggcttccttccctgagagggtgaccagaattagctgctttggatggtcggtgttgtagaacttcaacagtcgaggttgggagggattgtggtcttgaagaggcttataactctgttgcatgtccatcggtgctggggaacattgagaggctaagtttgcagaggctgaaggtcactaaccaggtgctttgttgatcctggaaggctgggatcaaatgctcatacccagctggttcaaccctgacatagaagtactgtgtttggcctgcacagagttttatttatttatttatttatttattaaatataaaggatttgtctccaggttgtcaaagtccttcccttacctgttaccacctctcttggctcatttacattatctggcccctcctgaaagtttttgcatttgcagccctttgtaaatatggaaaatggagccacgtgggcttgtcaggctgtgggaaaaacagtgtatctgcacacactaccttgtggtattcgtatccttgggagatctgcaaagattctacattcctaagtcgtcctggagaaatttacttttagttgattttagtccaaagcagtgctgtccaatgaaggtagaaggtgagtcagaagtgtgagctacctgatttacatggtctagtagctacattaaaaagaataaaaagaaataggtaaaattaattttagcaacacatcatctaatatgtaaaaaataatactccagcatataatcaaatataaataatgatcaatgagctgttttacatttgaagactctgctaggtctttgaaatcaggtgtgtatgtgatacttgtagctcatctcagtggcactggccacgtttaagtgtttatatagacacatgtggttgatggctactgtggccagtgcaggcctgaaacactgacttggggcttcttaggttataactattgctttacctcaagataaggttctaagagtgaccttaattactagctacaggttttttttttttttttcttttggagatggagttttgctctgtcacacaggctggagtgcagtggcgtgagctcagctcactgcaacctctgtctctcaggttcaaatgatactcctgccccagcctcccaagtagctaggattataggtgcctgcctccacgcccagctaattcttgtatttttagtagagacagggtttcaccatgttggccaggccggtctcgaactcctgacctcaggtgatctggccgtcttggcctcccaaggtgctgggattacagatgtgagccactgcacctggccaagccacagatttttaataacctcatgaatacagacttgaaaggagtgccacgtgaaagccagtgtcttagtatatatttttttagtgatttagtgtttgttatgtgtgtatagttatgagcaatatcatggacagatgcaacttttggcctttataggtgggacccagaaggctgggtatctggtttggccttgataatttgttggacagagaaggttttaaagggtttgagagggtagcattagtgaaactagtgaaactaggtggataccaagctagcattcctttttttttttttttttttttttttttttttgtggcgtgatctcagctcactgcaacttccgcctcccgggttcaagtgattcccctgcctcaacctcctgagtaggtgggactacaggtgcacaccaccatgcccagctaatttttatatttttatagagacggggattcaccatgttggccaggatggtcttgatctcttgacctcgtgatccgcctgccttggcctcccaaagtgctgggattacaggcgtgagccactgcgcctggccagcattccttttcataagctctttcgacttcctttcttccttggtcattaatgccaccaggcatgtgattagaaggccccttccctgccttttggattgtggagctgtagctctgagtctgcttcccgctggggctggtcggctcttggcctgtgtatcccctgctctttggggctgttggtttcaggaaaggcagcaaactgcagcaaaagcagaggtggggacagtgagggaaaatggatgatttagctttgccggccaccaggcagtagctgtactgtatgtatgtatgtatgtatgtatgtatgtatgtatgtatgtatgaatgaatgaatgaatgattgaatgagacagggtcttgctgtgtctcccagactagagtgtaatggtccattgatagcttactgcagccttgaactcctgggctcagacaatgttcctgcttcagcctcttaagtatctggtactataggcatacaccaccctacctggctaatttttagatttttttgtagagacaggttttgccatgttgcccaggctggtctcaagttcctggcctcaagcgatcctctcaccttgacctcccaaagctttgggattgcagatgtgagccacggcagctggcccctctagtactttattgaaactttcaattattttttatttctgcggctggtaaaggaatagtgaaaggctgtctagaactgtgattctggtttggtctaacaagactttgatgatgaactttgaaattcgttttgataaaattgtcctggtggtgtcacctgatcctcatctctggatgctttttgactgcaggttataaagagggtcctttctcctgggatgagacttgatctcctctgttgtgtttggtgtcttcatcaggctgtggggaagctagataagctgtttatttctgtttttaaatttttattatttattttttaaaaagatggagccttgctatgttgtcacaactggcttttaactcttgggctcaagcaattctcccgactcagcctctagagtagctgagacgcgtgcgccactccacctgacatgcttcagtttttgtggctgtgagttcagaaggctggactagatgatttctctggtcccttctggcttgtagaattcccttctgccgaggtcgttctcagtggctgtacctttgattttgttgctttactttccatgctgctctgtggccctgacctgtaaatacaggtttttgcaacttgcattcattgacagttaaatggaattcacttgtcatagatgtgaatacagtacactggaatgaagatgccccatggttaaagtacacacaggactatgagtgttataacttttattggtcttggctagatagagtcctggcctaaggactgagacagatttcttcatagcctcttaatgggaatcagagaccctcagtggggctcatggagggtcagagcactttccattgggcttccaaagagttccattgagccctttccagggtcctttctattgaccccctcatgcaatcagacctggacttgattgtccagtcccttggtaaggactcagtttatgattgtcagctaccttgctaggctgtaattgtctcaggcttccctagttttttctccttaatcctttttcagtccctgagaagcttctacatgtttcaaggggtagtctgctctttctgggagctgttaccgtcaaggttgctataaacaaatccatgttgtttatctgaggctgaagaaaattgacattaaactgatgtggtttttgtctgtgttggggtttgatcaaagaccacatctccttttgggttagaagtctgcctgatattttattgccatactaatgccaagcatctcaccctttttaatgtcttgtgcaggtcaacgtattgaaacttactgttgaagacttggagaaagagagggatttctacttcggaaagctacggaacattgaattgatttgccaggagaacgagggggaaaacgaccctgtattgcagaggattgtagacattctgtatgccacagatgtatgtgtttgacatgaggatattttctttccattttacatagaagggttggtgaactctgtgctgatgcttgttgtattccagtgttgcattcatcaaaagacttcatctttaacccctcaaagtcagccagagggcatctctgcccagctttagcttctgcctgaggtctgtgagcttttgaagaaggaataggacaaggaggtggctggcttgcccagcatctgtagtatgtggccactgataggtgatgagtgccacaaactgctcttagccagaagcaacccatgtcctcactccaccccacctcctattgcttggatccctcagcttcagttgctgcctccattttatcagggcccggggcatgcccggaaaagcaggcacatgctccctttttcacggcgtgcccacatatcacgtcatgtctgggtatgcctttctcctccctcctaggagtttgcctggttctcactccctcaaagtactctatgatcaagtttctttggatccatgtttattgcacagtcaaatctgttgatattaatcacgacatgttagttgatcagggaagactcatttttttctagatttaggattgttatccggctgtgtccactgtttaatggtgatgtttgtaattctgtgtgcctagcaaggtctgtaggatcaaactacaaacttctggtagtatgtgtagcactatgcaaatacaaggtagtaataatgctgttactgtcactgtccttgagacatatcttgtgaatttcaggggattaagacagatgactgaaaagttgataatctgttgaataaatctttaatttagagcttgctctgtgctatgtaatgaaaaaaagacaacgaagatatagggggtccttggtttagtctgagtattattttagtggagccacatcttaagtaagttcagctatagagatttagttaatagaaataagatggtggttgaaagagaagtctgattttacagcagaatagtatagtaatttcctgctctgagtccatgccagaatgccctgtagtgagaatgaggtgtgtgggagtcatgaatctgctttttccttgtgcactcaatttttctgccactgatgttgggtcagtcttgctgttgtgaatattttgggtaaagcatggctcctaagtataacaaaaggaaggcataaaaggaaagctggctgcatagacagtttattgagagaagatgttagagtactgaactttacaggggacttcaggaatttttgagggaaatttttttttttttttagtgacggggatctcactttattgcccaggctggagtgcctggtggtgcgatcatggctcactgcagctttgacctcctgggtcaagcagtcctgcctcgaccccgctggggagtagctgggactacaggcatgtcccaccaggcttggctagtttttttttttttcgagacattgtctcactgtgttacccaggctggtcttgaacttctgggctcaagccttggccttccaaagtgctaggattacaggcatgagccatcacacctggccttctttcttctttaaaaaacagttttattgaagtataactgacataataaactgcacatatttaaaatgtacctttgatgacatgggtgaaattaccaccataatgaagacaatgtaaatatgcatcactttcaaaagtttgagggtaaatttgactgtgctcagtttttgtctttggtgagatgcaattctactacccaagaaataaaatagcagtcacctggcctgtatagagccaggaagaaccattgtttttaagaggctgtaagtatgaggaaagtgaactcacagtagaaatggatctttcagtggctttcccctctcattttcctatttcaggaaggctttgtgatacctgatgaagggggcccacaggaggagcaagaagagtattaacagcctggaccagcagagcaacatcggaattcttcactccaaatcatgtgcttaactgtaaaatactcccttttgttatccttagaggactcactggtttcttttcataagcaaaaagtacctcttcttaaagtgcactttgcagacgtttcactccttttccaataagtttgagttaggagcttttaccttgtagcagagcagtattaacacctagttggttcacctggaaaacagagaggctgaccgtggggctcaccatgcggatgcgggtcacactgaatgctggagagatgttatgtaatatgctgaggtggcgacctcagtggagaaatgtaaagactgaattgaattttaagctaatgtgaaatcagagaatgttgtaataagtaaatgccttaagagtatttaaaatatgcttccacatttcaaaatataaaatgtaacatgacaagagattttgcgtttgacattgtgtctgggaaggaagggccagaccttggaacctttggaacctgctgtcaacaggtcttacagggctgcttgaaccctcataggcctaggctttggtctaaaaggaacatttaaaaagttgccctgtaaagttatttggtgtcattgaccaattgcatcccagctaaaaagcaagaggcatcgttgcctggataatagaggatgtgtttcagccctgagatgttacagttgaagagcttggttttcattgagcatttctctatttttccagttatccccgaaatttctatgtattatattttttggggaagtgaggtgtgcccagttttttaatctaacaactacttttggggacttgcccacatctctgggatttgaatggggattgtatcccattttactgtcttttaggtttacatttaccacgtttctcttctctgctccccttgcccactggggactcctctttggctccttgaagtttgctgcttagagttggaagtgcagcaggcaggtgatcatgctgcaagttctttctggacctctggcaaagggagtggtcagtgaaggccatcgttaccttgggatctgccaggctggggtgttttcggtatctgctgttcacagctctccactgtaatccgaatactttgccagtgcactaatctctttggagataaaattcattagtgtgttactaaatgttaattttcttttgcggaaaatacagtaccgtgtctgaattaattattaatatttaaaatacttcattccttaactctccctcatttgctttgcccacagcctattcagttcctttgtttggcaggattctgcaaaatgtgtctcacccactactgagattgttcagcccctgatgtatttgtattgatttgtttctggtggtagcttgtcctgaaatgtgtgtagaaagcaagtattttatgataaaaatgttgtgtagtgcatgctctgtgtggaattcagaggaaaacccagattcagtgattaacaatgccaaaaaatgcaagtaactagccattgttcaaatgacagtggtgctatttctcttttgtggccttttagacttttgttgccctaaaattccattttattgggaacccattttccacctggtctttcttgacagggtttttttctactttaaacagtttctaaataaaattctgtatttcaagagtatcatgtcttctgaaatttgtcttgccctgggtatatgctgttaggttcaagtgatgggaaaccagtgcttctttcttcagtgaggactgatcttttcacatcctttactgatttttcagatgtgcttatttcttcttcttcttcttttttttttttttttttttgagatggagtcttggtctgtcgcccaggctggagtgcagtggcatgatctcggctcactgcaacctctgcctcccaggttcaaacagttctctgcctcagcctcccaagtagctgggattataggcacccaccaccacgcccggctaatttttgtgtatttttagtagagatggggtttcaccatcttggccaggctgatcttgaactcctgacctcgtggtccacccacctcagcctcccaaagtgctgggattacaggcgtaagccaccgtgctcggtcagatgtgcttatttctaagctgacttcttttttcttcattcacattatattgtacagcctcctgctttttaaaattctcgttgctgtaagaggtttttcctctcggaagtccaaggcctggcctatctgctgtgaagccttttcagggcatttccttctgagaaatatagcaggacagtgcttggcagatgactgtggggagattttttttttttttttttctgaaggtgtgattctttcttcctttcttttttgagacagggtctccctctgttgcccagtctggagtgcagtggcatgatcttggctcactgcagccttgccctcttgggttcaagcgatcctcccacctcagcctcgtgagtagtggggactacaggcatgcaccaccatgcccagctaaactttgtattttttgtagagatggggtccccttatgttgcccaggcttgtcttgaactcctgggctcaagtgatcctcccaccttgacctcctaaagtgctgggattacaggtgtgagccactgcacccagccctgaaagtatgtttcaaagtcagttaacatgatcttaatctataaaataatctaaaattgtcaccatttttttctcccttataaaattatatgctattagaaatgagttcaaaaggagacttgctgccattttctgtcagaaataaagttaaatgggcagagatagtgtgttgtaggatatgtagagtcatggttatggatgctctataaacccaacctgatgatcttgacaagggttgcacccatagttaatggtatgatacctcccttaaagtgttaaataccttcagaaggaatttgacaccatatgtattggtcatctacaagaagataccttccaggagtgcaaggagtttgtgaagatactgttggctactgtcaattgagaagttaccttggtaaagagagaagccaaaactgtgggtatctgaccaagtgcattgacctggctcttgaatttgaagcacatacagtctttgctgcttggtttgcttggcaggttctgtgtttcatgaaggataggtaaacaaatgggttctctggctcaatttggatcattgttcatgctgatgattctcaaactgatgggcttcagaatcacatggggaacttgtttgacataatgtatttataaaaattcatcaccagagattctgagtttggaggttgaaaacctgcattttaatttgggccttatctacatgtctgcaattttaaataataattctggcaaggggaacatcagacttgagtcctcttgcaggtctctcctgctttgtgagttttgagctatttgacctctcttgttcttacatgcaagacagagatgatgattttggctgacgtgcctccctcactgggtacttgttgggattagaaggagctgatggaccaaaaaaaaacagcaccacaaagctaaaaagctctgtacagacaagaggcattatttatggcacaagttcttcagatctggtctgaaattctgtttatagattagaaaaagcttaggacagggcttttgtatcctcagaattcggaagggcattccttcagacaggctttgggtgttttgtaaaatacacccaaagtatttccttttcagcatggtatatggacaagtagaactcccttatgtcttcaggctcttatgtttatcctgtttttgttttcttttaaatgaagattcaatgtctcagattcattgattaaaaacccatattttcttcaagatttactctctagaatgtgaagggttttgaaaaggaagcatttttcttttgccctagccaaggtgatcctctgtagtttttcttttaaggattgttttagaagattgagtataaaggactccttttgtgatgttgaccatagttcattgcaaagtccacaaataaaaatccaagctttaggcctgatcagcctagtcagattagcttgctagcatgtgggtgacccaaatctgattgttgacaacagagaacattgctttgaaacaagctgaacctcagtctgtgatcagtgttgtgaaccacccgtcatttttctggtctggcactgttgtaatatgtcttttttttttttttttttttttccccagacagtcttgctctgtcacccaggctggagtgcagtggcacgatcttggctcactgcaacctccacctcccaggctgaagcagttcccgtacctcagcctcctgagtagctgggattacaggcctgtgccactatgcctggctaatttttgtattttcagtagagatggagttttgccatgttgcccaaggtagtctcgaactcctggcctcaagtgatccacctgtcttggcctcccaaagtgctgggattacaggtgtgagccaccactccctgcttgatatcatacttttggattcacacatttagtttgtaaaatgtcaaaaccagatgagttcatatttatttctgtatcttcatgacgcttgctgctttttttctcttcattttcacatgcgagggtataactgagtgttcagggttttctctgaaagcctgaagggattgtgtacttttacattgaacttgactgcagttagaaccattaacctagatgacttcagccaaattatgtattgtttttgtttttgtttttttgagacagggtctcctgtcacccaggctggagtgcagtggcacagtcatggctcatgacagcctcaacttcctgggcttcagctgtcctcccacctcaacctccatagtagctgggactgtagtgcacaccaccatgcctggctggctaattttttttttttttttttttttgagacagagtttcattcttgttgcccaggttggagtacagtggtgccatcttggctcactgcaacctccgcctcctgggttcaagcgagtctcctgcctcaacctcgagagtagctgggattacaggcgcccaccaccacacccagctaatttttgtgtttttagtagagacggggttttgccatgttagccaggctggtctggaactcctgacctcaggtgatccacctgcctcggcctcccaaagtgctgggattacaggcgtgagccaccatgcccggccaattttttggtattttttgtagagacggggtttgctatattgcaggctggtcttgaacccctgggctcaaacaatttacccatctcttcctccccaaatgctgggaggtgtgagtcactgtgcctggcccaaattgctatatagccgtgacttgtgaaggtctgttccccctttggtttaatctgatttgggaagtaatgttaccttagtccttggagtgcagaagctttctctgtactctattgaggttgtatccagtagcttcattaatttggttatctaggtgagcaggtcaagccttagagtcaaatttctaggctcctcaatctagaaccttaaatcttgaggtgcgtgtgtgtatcaaaattgtaaataactctcgtttccttgtattggaggctctcaggttctgaaatgtgaaatggaaatagccttcatagacacgtttctgagtgtgaggaggcagttctttgtcctgtgaccatttgaaagcaaaccaggttacccaccaatgcctagaactttgtaagtggcatcaagatataaatttataattgtaaaataacctatcagcagtttggggctgggtgtcatggctcatgcctgtaatcccagcactttgggaggccagtgcagaaggattgcttgagcccaggagtttgaaactagcctgggcaacatagcaagagaccctgtctctatttaaaagattttatatatatatatgatcatatataatatatataagatatatatgatcatatatataatatatatatatatgatcatatatatcttatatatatatatgcagtttggaattctatttgtcttgccttatttgctttttaaaaatttctaccttagttttttcctggtttactttgagtgtttttttgtagtcggaggagattgttggtgcggctgggtgtaggtatgaggcagaggaggaagagtaatttattccatctactgagcctttcatttactttctgttttagcagtagagtgggatgtcggaagcttttgttgggtgagagtcaatctgtcagggtaaatcttaaaaagctggatttgtggtttagttactagttactgtgtctccagtggagacaaagattagtttttaagatttagccttaatggatgattcacaaattgcaatgcagagtattgaagttaagtccaaggtcaagcacacaagtgggtaaaactgaacatatgaaatgggtgtgtggctggcacccacctctgacctttactgaaataaatgaggaagacggtgctgtaagtggaatgccacggaccaggagttaagaccagagtcctctgctaggccctgcatctgaagtctgcagagcatggcttttcattggctcagtgaggagttgagtcctggttcagaaaaagttaccgaggtctgtaaaagtcagtaggataccggaacaagaaagagtgggagagtgtacagttcccagcgaacattgccagtggaggctaattttcaccagtgaagggcgattttgatagaaaagcacagtgtctcaactacttgtggtttttgattctgaaagaggaggctttggcaggagcaataatacacgtggcctaccacctgtttggctttttccccacaggttgcaagctgcagggagggccttgctaattctagtacctccatccccgaatcgtctaaatgtattttacccaggacctgtcatggtttatctgagtgaccagtttcctttcctctcttgcttatttatcatgttcatatttatatttttcataatggggcctatttatatattttgaagtagttctagtgattttaagatccagcaaaacttcaaggtcatctggattttggtgttctatttaagttttctaacttgatacagtctttttttttttttttgtattttgtatgtttttctacaaaatgtgagagagttaagcatgtataattacatatgactgctgttttcactttgaaattttaaatcctgcttgggagaatggaataagctattgtgttttttgcaggcagctatgggatatcccaatttgtccctccctcctccttaattttgaagcctgagagaggaagtaataattttcttttttttttttttttttggtagggatggggtttgactatgctgtgcaggttggtctgcaactcctaagctcaagtgatccgccctcctccgcctcccaaagtgctgggattacaggcctgagccaccgtgcctggtctgaagaagtaataattttaagattcagtgttgagtgaaataaatgtattcttaaaaatttctaagagtgtttaactctctgacctaatatttaatattttccccaatcattaggaagtgcttttttgttgttgttgttgttttttttccaggcagggtctcgctctgtcacccaggctggagtgcagtggcatggtcacggctcactgcagccttgacttcccgggctcaagtgattctcccacctcagcctcccaaggagctggaactgctcagctaattttatttttgtagagacagggtctggctatgttccccaggctggtctcaaactcctgggctcaagcagtcctccaccactcctggccaagaagtgcctttttttttttttttttttttaaagtagctgctgaacacaggagaatctgcctttttcttgaatcgtggtttttttgtttttttttttttcaagacggagtgttgctgttgtcgcccgggctggagtgctgtggtgcgatcttggctaattgcaacctccgcctcccagattcaagcgattgtcctgcctcagcctcccgagtagctgagattacaggcacgcaccaccgtgcctggctaatttttgtgtttttagtagaaacaggatttcaccatgttggccaggctggtctcaaactcctgaccttgtgatccacctgcctcggcctcccaaagtgctgggtttacaggcgtgaaccactgcacccggcctgaatcatggttttttgaaaccattggcatctgaacctgtagctctctctggtagtgttgtgtggttttaaatgtcatgtgagctgagttactgacctcaacctactgccagatgaaggtgtgatcctgtgataccaatcttgagggtcccttctagttttagcagtcagtgacttctcttgtttatttttgtttgaaaaagtaaaaggctctctttttggctatagagttgcatcttgaaatttttgacaaattacatagagctgaagaaggatacaagttttgatatcttaaaatcacagggttgaagcttgaaaggacagtattggcattgcagctaagtgggagtgtgaggaagcgccttctctagggcaggtaattgcatctgttaatgtggtccttgggcccctgagttgctgccttccaatcagaattcccttagcattagccagtgacgcctgaattaatctcaggtaggacttctaacttttttccaaaattatttttgtgcagaggtttatctagatttttcttctaaatgtcctcctccccacttgttttattattactgtttttttctctctttaatttttttttttttttaatagagacatggtctcactatgttgcctgggctgatctcagactcctgggctcaagtgatcctcctgcctcagcttcccaaagtgctgggattataggcgtgagccattgcgcctggctctgttactgtttttctaacctgagttacttaggatcatattttcattcttttttaaaaagatgggagttttctgaacttttccttaactaaaaagtggaatgcatcttaatattttcctttttttacttgtgtttctccccagggagggaaaaacatatttattgtgacagaatttagcatattttaggccacattaaaatactgataaatgtattaatcagtgaaaataggttatagtgaaaaatatataccatttgattaataaaaatgttattggaaaaatgcaagaactgctgtaagaattgctaacattgtgttggaaaataaatatactaagctaagaaacaatgggaaactgtcatatgtagggccaacagcctttttttttttaaacccttccaatttattaatatctagtctaataaaccctgatttataggacctctgcaccttttttgactttttattcatccattcttaatattctacactatgacaaaatccttaaaactccattattgatgaaatgggaacagacttttgtttttgtatgttggtgttctctgagtggtgaaggcccagggagaatgttttgtttggtggtcacttagcatttgaaaacatccacttccttgtgacttagctgggtatcttttaacatctggaagccacgtccctgattgaaatctctggagacaacttacctttcaccaacttgtctgccaaattgcaccatggaccaagattgcagtggctgcatcaagtctaggcctgccctgaagtctggatttgtaagtcccccatttcaaatggggcagaaggcagaggagcagaggagccactgtgcctttcgctgtcctggagccagttggccttctggttttggtgaaccctgcttttataagaggactccctggcatcttccagtttcccgctacttgttttatgtattattttatgtctgtgtttgtcctggagtgctgtaactcctttcactgtctgctgtaagttcaacttcttcaataaaagaaatgtttcaaattggatgaaaaatggttctgtgattatggtttgtgggacgggttctgatgcttcatttatgttcttcatacggaattctgtctcatttccctagttctaaatatgaccagcagacccagagttccatctcgacttcataaaggagctgtcttggactgggaacagctgccaatgtctttgttgagatgggagttggaaagtgttagcactttgccagactttgccagcaagattaactgaggagatcaaattgagtcagggtgagtgagggttttaggtgaaagttgctctccaaaagattggatacctctgctgaagacctctgcctgacctccaaggctggagagcagctcttatctgtgtcctggctggctttcaatgcatgtatccttaagtcatctgcctctacaaattcgtacaaaccactcgttcccctctcatccctagcatgttcccctagtggctgctctgaattctcacccctgttctggatggtactctcccacctgccttgccctgcccctcttccgtcagctccggacaggtcaactttagggaatagattgaggcagatggatgtgacttctgatctgacctgttctccaattctaaatatcaaccgagttttacatctcagccttcccttccttcccttcagagttggaggaatggtacttgtcttggcctctcccctcttgcttttgcccttttcttttgggtggtctctgttggcagcaaccagcactttttttcccatttggcgttttacctctgttcatgaacatacatagaaccactttctcctggtgaaagacatttatcttacaaaatatttagttttgaaataattaaaaatatataaatagttgtaagactactacaaagaacttccctttgtccagatagactaattgtgaacattttgccacatttgtgttattatacatgttacttgttaaaccatttgagaattacagacatcatgcccttttacccctaaatacttttcagtgtacatttcctgaaacaaggacattctcataaccacaatacagttatcaaaagcagaaaacattaatatgctatctaataatatagagtccatgttcaaattttacataatttcaccaaataacagcccttgcagcatttttgttttttcccaatcggattcaattcagaatcgtgcattgcctttagttgttgggtctcttgagtcacctttcatctctaacagttccttagcctttctttggtttacatggcattttattttggccaggcgcggtgactcacgcctgtaatcccagcactttgggaagccaaggcgggcggaaagcacttgaggccaaggagtttgagaccagcctggccaacatggagaaatcctgtttctactaaaaatacgaaagttagctgggcatggtggcgtgcacctataatcccagctactgaggaggctgaggcatgagaatcatcagaatctgggaggtggaggttgcggtgagctgagattgagccactgcattccagcctgtgacagagtgagactctcaaaaataaaagcaaaaaaaaacccagttattttgtagaatatcctgtaatgtgggtttgtctgtttccttatgattagattcagatcatgtatttttttggcaataatactactgaagcattgtgccctgcatgtatcggatcaggaggtgtgtgatggatgtcattttgttccatcgctgatggtggtaactttttttttttttttttttttttttttttttgagatggagtcttactcttttgcctaggctggagtgcaatggcacagtcttagttcactgcaacctccacctcctgggttcaagcgattctcgtgcctcagtctcccgagtagctgggattacagacgtcagccattgtgcccaggctattttttcattcttttataaaaattggcatcatagtgtgcacccttttctgcatcttggtttttttatttatttatttttttgagacaaggtctcattctctcacccaggccctggagtgcagtgttgtgattacagttcactacggcctcaaacttctggatgcaggtaatcctcccatctcaccctcttgagtagctgggactacaggggagtgtcaccatacccagataattttttgtatgttttgtacagatggggtttcaccatgttgcccaggctggtctcaaattcctgggctcaagcgatcttcccaccttggcctcaagtgttggcattacaggtatgagccactgtgcctggcctgcatcgtgcttttcttattagtacttcatggaaatctctcttagctgctggaagtcagattcatccttctgatgtttgggtgacgtcctaggtgcagatgcactgatttgttcatttctgtgtctataatggttcacttttggtttttgctcctatgaatgatgctgcagcaatcactcttcaacagtggcctttcacaaaggagtcatttaaattactacccaccatcctacccactccactgaaacacattttattttatttttttgagacggagttgcgttcttgttgcccaggctggagtgcaatggcacaatctcggctcaccgcaacctccgcctcctggattcaagcagttctcctgcctcagcctcctgagtagctgggattacaggcatccaccaccacacccagctaacgtttgtatttttagtggagatgggatttctccatgctggccaggctggtcttgaactcctgacatcaggtgatccgtctgcctcggcctcccaaagtgctagaagtacagatgtgagccaccgcgcctagccgttgaaacacatgttaaagattgccatgagcctggtgtggtggcatgtgcctgttgtcccagctacttgggaggctgagatgggaggatcacctgagcccaggagtgcaaaaccagcctgggcaacattgcaagaccccatctcaaaagatcgccatgaacccttttttaattaaaataaaaatcagagaattgcatgatttaggctataaacatcttccataatctcacctaccagagatgactgctattaattttggagtatatgtttccaggctcttttttatgcatgtgccaatatgcacatgcatatattcttaacagaaatgaacttaacattttacatacactttagttttttcactggtaacctcttaattgcctttttcagtggctgtttctttcccttatcaccttaggtcactttgtagcgtcccattctcctagctgtcttgtgtgtttctccctctttctgtcctctaaatgtagccactcctcaagtttcagtccccagatttccagatacttgtttttattatttcttttcttttttttttttttgagacagggtctcactctgtcatccaggctggagtgtagtggtatgatctcagctctctgcagcctcaacctcctgggctcaagtaattctcccacctcagcctcctgagtagctgggtgtataggcatgtgccaccacacctggctaattttggattttttgtagatgtggggtctcaatgttgcccaggctggtctcaaactcctggatgcaagcgatcctcccgcctcggcctattttttattcctaattggacagcctagtatcacatgcattaaaaccactttccctctttgctcctttttctgaaagtggttctggcatttctgttagcttgcttcttggcttccaaatctccttcccttaggctgtcctctctcctttggtccttaggtgtgagctgttgccaagacactgctagattagagcattcttgggtaccgttcagtcttctccctccagcttgtactgatgaattttattttttatttttttgggacagagtcttgctcttgttgcccaggctagagtacaatggctcgatctcggctcatggcaacctctgcctcccaggttcaagcaatcctcctgcctcagcctcccaagtagctgggattacaggaacctgccaccaaacccggctaattttttatatttttagtagagacagggtttcaatatgttggccaggctggtctcatttgaactgttgacctcaggcaatccttccgccttggcctcccaaagtgctgggattacaggtatgagccactgcacctggccactgatgactttcatagttgcccttcattttgttcagactgtctggccaggtattcaagattctactttttgctgccaatttttttttttttccttctctgccatgattcctccctcccctctgcctccaggacccttcagatcaagccaagctggctcagttggtctgccccctgtgcgtgtcttgggcttaactatttcttggctgtccccctgccatcctagagtgccctctggactcttgcctggtgggacttgctgacgaggtggattggtgctccaaagaccctaacaaaacgctgtcatccatctcatatggaggccttgctgacccaatagaaacgttctctttatattcccagagcagagctctgttctgtctgctctcccgaagtcctggcttgcaagggcactggaaggtgggtggggagggtatatgcagtggaaatgaggagccctcatttttctaatctgtttattgtacttggactaccacatggcctcctaagattcttctacttctgtagaaagtgtgatcccctttaggaagcctctggcattaagtcaggagtaaagaaacttgtgaaaccccatggcttctgcaggacaactcctctctatcaggggaagaaaggctcaagtgcaagcttggcaaaagctttttgctggagaaatctctgggaaaaggaatgctcatccactgctcgctgggagtgtccatgggcaaggggaagccaccctctcccttgaccttgacttcttttccacctttctgtgacctggctaagtcagccttccacgtggtccttacaacgactggagttaagttgactatgattccctattctaggtcaaggctaatgtcttctgaagacttagcagagatccctcaactccaaaaggtaagaaagacaattatctgaactaataaagggtggggcattccagagtcacccaaaacctcacttaccagcatggaagtataggtgtttctgcatcggggagggggttgcatactcagatatttactgggcaggtaacttaagtgtattttttttttttgagacagagtctcgctctgtcgcccaggctggagtgcagtggcatcatcttggctcactgaaacctctgcctcctgggttcaagcaattctcttgcctcagcctcctgagtagctaggattacaggcatgtgccaccatgcccagctaatttttatatttttagtagagatggggttttaccatgttggccaggctggtctcaaactcctgacctcatgatctgcccgcctcagcctcccaaagtgctgggactacaggcgtgagccaccacacctgacctaagtgtacttttaaagggctgcctgagactgggtatggtggctcacacctgtagtcccagcactttgtgaggtgaaggcaggaggatcgctgagcccaggagtttgagacctgcctgggcaacatagtgaaaccccatctctacaaaaagtaaaaaataaattaggcatggtggcacatgcctgtggtccccgctactccagaggctgaggtggggggattgcttgagcctgggatgtcgaggctacagtcagccatgatctcgccattgcacttatcctgggcaacagagcgagaccctgtctctaaaaaaacaaaacaaaaaagctacatgagtcaaatgcaacacacccgagccccctgatgtacggtctgtacgtggactccacttctctacttaattttgtccagcaggttgtgataatagtgggatgggctgtaagagtttttatcaagccaggtatgtatcaattgtctgttatgtgcttggggctggggagtatagagataattaatacaaattagattaagttaagttaaacatgcctttgtctttgaagagctcactatgagacaaggagtaataacaagagctgtcatttattgtgtaattacagtttactggggcttcacatgtattcaggtgtcatttaggtctcaaccacagccctgcagggtagggactgtggctctctgttttgcagatgaggaaacctgtggctcagggaagtgatgtgatatgcctaagttaaaatagcctgtaagtgagggagccagacagaattccaacccagagctctggggctctgcagccgtgtgcttcccctcatgccttgctgcccacatgtatggacagacaagcacacttactatgccttgaggggcagatatgaacaaagacctgggaatatggaggtggcagtgatgactgtcatctgaaagttatggaagagctccttgggggaggttccatttgagcgagagtctgaagagtgggtaggggttcacctctaggggagatgggttggactgtgtatgggagacacacgtgagtaagcaccgaatgcttgctgggcttggggatggtggggagcaggtggtgtgcctggaacatggtgcatgcttgaaactagaaagataggtcagagctggttaggaagtactttgaatgctacactccggagttggggtgaagagtgtcagaagcagggtaaagtcattgatcagatttgctgcctagaagccaggcgcagtggcccatatctgtaatcccagcactttgggaggccaaggcaggaggatcacctgaggtcaggagttcgaggccagcctggtcaacatggtgaaaccctgtctctactaaaaatacaaaaaattagccaggcgtggtgactcatgcctgtagtcccagctacttgggaagctggttcacgagaatcacttgaacccaggaggcagaggttgcagtgagctgagatcgcaccacgctccagctgggtgacagagtgagactctgtctcaaaaaaaaaaaaaaaaatttgctgcctagaaagatgactggtgccagtgttgggaggtggatgggaagagagggtcaaactctggtcttagtggtggtcattgtacttgtcccagcaaaagactacagtttggggcgagcaggggtgtgggagaggaggcttatatgtaggagatggatcccaggaataattaactggagggacggtagaatgcataggaagaagagggaagagctgaaggcggtgctgagatttctaatttggagtctgggtgtgtagtgagagccttcacgtgctcctctgttgggctccgtggaggcagggaccctcactatgttcacggtgtatccacagtgctgtatccacagtgcctagcactcagtcaatgtgtgtagacgctgggctaatgaatgaaaggtcacaggaggatgagcacatttgctctttagttggggctaagtgggggagagtgagcaatttaatcccttgtcttttggctttttgaactaaagtgttttcaacttcccaaggcccaaagcaatgtgtctcagtgagcaggactgcctgcctgccactcaggtcatctaattatccacgttagagtcttttagggaaggcagcctttgatggcctgagctttggtgacctgacacattatgctaagtatctgtatcagtctcatggaggggtgaggagaggaagcatcatgaggcctggaggggtggggaaggcttctggggggatttgggaaggatgagtagaagggggaagtgagggagaacccccagtggaggggtctgtatgagcattggtgtgttggcagggaggccaggggtggggcaggtgagctcatctgaccgagatgggacatctgggctggtcaggaccaggtcaaattagggaaaatggagctggattccctggggttttcttccttccttccttccttccttccctccctcccccttcttcccttcctccctttcttccttccttccttccctccctccctccctctcttccttccttccttccctccttccttccttcctttctttctctctctctttctttctttccttccttccttcctttctttctctctctctctttctttctttcgtttctttcgtttcttttttttttgaagtcttgctctgttgcccaggctggaatgcagcggcacaatctcagctcactgcaacctccacctcctgggttcgagtgattctcctgcctcagcctcctgagtagctgggactacaggcacatgccaccacacccagctaatgtttttgtatttttagtagacgtgggtttctaccatgttggtcaggctggtctcaaactcctgacctcaaatgatccgccctcctcggcctcccgaagtgctgggattatgggcatgagccaccatgcccagccccctggggttctgaattctgaccactgaagatttgaaatgatatagttactgaactgaggtcccttataaatgaacaccccattatgagtaaggtaggacttggctgtatcctccctgagcctcagctgtggcatctgtaaaaagggaacaatggttccctctccaaagtcggaagagtctaggtttttctttatcttcttaggtgtaaaaatggttaagaattctgtatttctgtcagtgacatcataacactacttaccttgttctttctcaaagagtctctctttaaatcatgtgctgaaaatgtttggctcaggaaattgaaacgctcagtccctggttcttgttatattcgttccagctgtccatcccacatggcttccagaacaaggaggctgctagctccccaacaccatccatcacccttagccaggtgcctgacctccagcctgggtcccagctgtttactgagatacacctggccaagatagagaaaatgtttgaggaggacatcaactcgactggaggtaaggccgctctgtaggctcggtttttgtgtgagttctgcaacagggcaggaccgagtacctggggtgtgtggagggttcagacataataagcattttttttttgtttttgagacaggatattgctctgtcacccagtctggagtgcagtggtgtgatcaccacggcagcctcaacctcccatgctcaagcgatcctcctgtctcagcccccagagtagctgggactacatgcacataccaccactcctggctaattaaaatttttcttttttttttagaaacaagggcttgctattaggttggtgcaaaagtaattgcagttttgctattaaaagtaatggcagaaatcacaattgcttttgcaccaatgtgatatgtggtccaggctcgtctgggactactgggctcaagtgatcctcctgccttggcccccggagtagctgaaactacaggcacatgccaccatgcctggctaattaaaaaaataataattgtagagacgaggtcttgctatgttgcccaggctggtctcaaactcctgggctcaagcagcgccttctgccttggcctcccaaagtgctgggattacaggtgtgagccactgtgcccaaccctgatcagcatctttgcatctagtgtctcctgtaaaactttcaagcattatgtaggtattgcaagcatattggaggctatttgggatctagaaaatttttaaaaatacccctagtccaaatacccacatgtaaccactgttagcattttggtgtatgtattttcttccagtttcatatgtatggtttattatctgttgctgtgtgataataccacagtcttagtggcttaaaccaatgcacgtttatcacctcacagttctggtggggcaggagtctgggcatggcttagctggcttctctgttcaggctctcacaaggctgcaatcaagttgttggctgggaccggtgtggtggctcacacctctaatcccaacagtttgagaggccaaggcgggcagatcacttaaggtcaggagttcaagagcagcctggccaacatggtgaaaccccgtctctactaaaaatacaaaaattagctgggcgtggtggcacgggcctctaattccagctacttgggaggctgaggcaagagaatcgcttgaatctgggaagcagaggttgcagtgagccaaggtcatgccactttactccagcctagaccacagagtgagactccatctcaaaaaaaaaaaagtcgtcagctggggctgtggaatcatcttggggttgactggggaagaacccacttccaagctcactcaggttgttggcagaattcagttccttgcccctgtgtgactgagggcttctgtttcttcctgactgttggtgggaggctacctacagttcctggccacgcaggattcaccaacagagctgtttgcaaggctcaagccaacaacagggagaaaaactccagcaagatgggtgttgcaatttttttttttttttgagacggagtttcactcttgttgcccaggctggagtgcaatggcacgatcttggctcactgcaacctccgcctctggttcaagcgattctcctgtctcagcctcccaagtagctgggattactggtatgtgccaccacgcctggctgtattttgtatttttagtagagacggggtttctccatgttgggcaggctggtctcgagctcccgacctcaggtgatccgcctgccttagcctcccaaagtgctgggattacaggcgtgagctgctgtgcctggccaggtgttgcaatcttatataacaaatcatgtaatcatgtgcacatagtcctgcacaccctgtcacctgtgccatattctgttggttagaagcaagtcacaggtcccaccacactccaggggaggggatcgaaggagggactgagcaccaggaggcacacagtatgggggctgcttaagtctctctactgcagatgactgtgtatgttttcatatgtctttaatcatactatatatgtaatttcagactacttttcacttaatgctaatatcctaaggaattttccatattgctacataatcttccaagtcatcattactaacagaggcagttgtttcactggctaagctattcctctgttttcagacgtttaggttttattgagttgaatgttgtaaagatatcctttgtgcctcaagccttttctctgtttagagcttgatttttccccctgagataatactcctgtaagtcaaataataggaatacttaaaggcatctttctttatatccactagaccatgctagggtcctatttacctgccctgtgaatttcttttgagatttacaaccacactgtgatgtgggcaggaaaggataagaaatctccagtttacgaacgagtaaagtgagacctaggagggacaatttgtgtctggtctgaagatagggtgattcctgggtggtggtcttcaatgtcattgtttgcagccaggaagtgccaccactgtgtctgggaggactccattggtactgaccttggccatcgtttttattgtgtttgtgtatgttttgaataggtaatatacccacacagttcaatatatccaaacggttcaaaatccaaaaggtacttttttcatgatacttttttgatatacagagaaaatgtttttctcccccaccacccatgtgcccaggtatgtccctttaagttattactgttttctgtttcctgtgatctttatttttaatttttttagggacagggtctcgcttggttgcccaggctggagtggagtggtgtgatcataactcactgcagccttgaactcctgggctcaagtgatcctcctgtctcagcctctggagtagctagaattagaggcatgtgccacaatacctgggtaatttttaaaaactttttggtagagatggggtcttgctatgttgcccaggctagtctcaaactcctggcttcaagcaatccttctgcctctgcctcccaaagtgttgggattacaagcgttagccactgcacccagcctcctatgacctttggaaataaatacagaagtatctttagtcatttctacttcttcttcttttttttttttttcctgaaatggagtctcactctgtcacccaggctagagtgcagtggtgcgatctcggctcactgcaacctctgcctcccaggttcaagtgattcgcctgtctcagcctcccgagtagctgggactacaggcacgcaccactggctaattttggtattttcagtagagacagggtttcaccatgttggtcaggctagtcttgaactcctgacctcaggtgatccacctgtctcgcctcccaaagttctgggatttcaggtgtgagccaccgtgcccggccctctctacttcttcttttaaattttagtgtccagtcatcagtttcctccctttttttatatgcagtggcagcctattgtccacactgttctattctttgcttttattttttttaatttttattcttttaaatttcttttagagatagggttttcctgtgtagcccagggtggagtgcagtggtgtgatgatagttcactgaagcctcgacctcctgggctcaagcaatcctcctgactcagcctccagagtagctaggactacaggtgcatgctaccacatccagctaattttttcatttttattttctgtagagatggtgtcttgctatgctgtattccttgcttttttaaaaaattaattttaacaagtttacctcttgctttttactgaatgtatcttgcagatattttcatatcaatattaaaaaccctttctcattttaaaaaaccaactttggctttaaatgggagaaaagaaaattcaccttttgttgatgtaggataaaggaaaataggatcatttttctcttttgaaagtcttttaaggaggtggattatgagtgcgggctccataccgtgtcttaggcaccccaactgtcactgcgtgccttggagggaagaggggacatgccagtgtccttcttcctgttctgtaagttcccttttcctagcttcagtccaggttgtgccagatctttgagggaagtcagtggttcttaaagaggaaagagtgcctttcagtctccccaggaggttttgaaagcacacaaaggcagtttgactcccagctctgtctggaaggaggccgcagggctcatggcctgccccctggcatctatcttctacctggaaggaccattaagtgcttaagcaccttggctgtaactccagataaacaagatgggtccctcttttagcaaggcatgatttcttcaggctttccatttattccttgatccagcaacaaatataataataattactgttgtatcattgtgctgggtgttgtataaggagaatagaatggggttaagagcatgagttctggagccagattgctagggttagtatctggtgctaccacttaccagctgtgtgaccttgggcaagcaaccacgcctctctgtgccacattttcttccttatgtaggtagtcagggtgcataaggcacagagaacaatgcctggcatgaagtgccatcaccggcacatctcagtgcccacagaaaccctcaggggaccaatgtttgttgaagccaggacccagccctggggcaacaggctcatgcctgccatcccagagctctcaggctggagtgggagatagaagacagacagacaagagtgaaagcgagctgggcacggtggctcatgcctgtaatccctgcactttgggatcccagcgagctgaggtgggtggatcaagaggtcaagggttcgagaccagcctggccaacatggtgaaaccctgtccctactaaaaatacaaaaattagctgggcatggtggtgggtgcctgtagttccagctacttgggaggctgagccaggagaatttcttgaacccaggaggtggaggttgtagtgagccaagatcatgccaccacactccagcctgggcaacagagcgagactccatctcaaaaacaaaaacaaaaggccgggtgcagtggctcatgcctgtaatcccagcattttgggaggccgaggtgggcggatcgcctgtggtcaggagttcgagaccagcctggccaacatggcgaaaccctgtctctactaaaaatacaaaaattagccgagtgtgatggtgggcgcctgtaatcccagctacttgggaggccgaggcagggagaattgcttgaacccaggatgcggaggttgcagtgagccgagatcgtgccattgcactccagcctgggcaataagagcaaaactccatctcaaagagcaaaacaaaacaaaacagaatactaaaaacaaaaaacaaaaacaaaacacaaaacagtgaaagccagtgtgtcagctgataatgtcagcaagaaccatggaactgggcaatggcgggggtggcctccttagacagaccctaggaaggcttccctatggaaggagccccctgaactctgaggatgttggccaggatggtctccatctcttgacctcgtgatccacctgcctcggcctcccaaagtgctgggattacaggtgtgagccactgtgcccagcccagaagcactttttaaagattgtgattattaaaaaaaaagttgtagacaggggttattgacccatttgcagacagatccccttatagacccagccagcacgtggagaattttctatccttgcctgttcctcctttcttctccccatcttttccttcagccaaagtttatattttgataattgcttttagaagatgcagtttggctgggtgtggtaggctcacacctgtaatcccagcactttgggaggctggagagggcggatcacttgaggtcaggagtttgagagcagcctggccaacatgatgaaaccccatctctactaaaaatacaaaaattagcaggaagtagcttgaacccaggaggcagaggttgcagtgagctgagattgtgccactgtactccagcctgggcaacagagcgagactctgtccaaaaaaaaaaaaaatgcagttcacctctccttctagatgtctgaatttattaatgtctatttgttgccattatatacttttgttctgctgcttcttttcttcgtttttattttatttatttatttattgagacagggtcttactctgttatccaggctggagtgcagtggtgaaatctctgctcactgcaacctccgcctctcaggctcaagcaatcctcccagctcaacctccccagtagttgggactacaggcatgtgccaccatgcctggctaatttttgtattttctgtgaagatgcggtttcaccatgttgcccagcctggtctcaaactcctgggctcaagccttctgcccacctcagcctcccaaagtactgggattataggtgtgaacacttgcttccagcctttattttatttattttttagagacaaggtctgtctccatcacctaggctacagtacagtggcaagatcatggccaacttcagcctctgcctcccgggttcaagccatcctcccacctcagtctctcgaccagctgggactacaggctcacgccactacacctggctaatttaaaaaattttttttgtagattgggtctccttatgtttcccagcctggtcttgaactcctgatctcaagtgatcctcatacctcagcctcccaaagcactggaattacagacatgagccactgtgcctggccttgcttctacttttattttctttcctttttctttttttgagacagtctcactcggtcgctcaggctggagtgcagtggtgcaatctcggttcactgcaacctctgcctcctgggttcaagtgattcttgtgcctcagcctcccaagtagctgggattacaggcacacgccaccaaacatggctaatttttgtttttgtttttaaaaatatttaaatatttattttctttcttcctttctttctgacagagtctggctctgttgcccaggctggagtgcgttggtgtgatctcggctcactgcaacctctgcctcctggattcaagcgattctcctgcctcaacctcccaagtagctgggattacaggcatgtgccaccatgcctggctaactttttgtattttttagtagaggcagggttttgccatgttggtcaggctggtctcgaactcctagcctcaggtgatcttcccgcctctgcctcccagagtgctgggattacaggcgtgagccaccgtgcctggcctggttctccttttctttggagagttttctttgtctcaatccttcctctttgttaattgtatggaaatgggagttggtcttttttagtgcctcccctccccacactgctgtgggaccaacacagtgctcccatatggcgggttttcagccaggacttgtggggtggttgaatgttgagcagataagatgcaaaagataaccatgtgaggacagaagcgtccggaattggcctagcctggggtggctggggtggatgctgagatgtgaggaggggagacagggccaagaggggctggatttgaggtttgaggggctggaggaggcagcctcctaagggccccgtctttggctggagccatctcccttctgtgccccctgcagtggaccagctgaggaccgtaggggaggcagcaccaagactgccttgaactgagcacacctggtaaacatggtggttttttttttttttttttgagacagagttttctctcttgttgcccaggctggagtgcagtggtgcgatctcagctcactgcaacctctgcctcctgagttcaagggattctcctgcctcagcctcccaagtagctgggattgcaggtacccaccactgtgcccagccaatttatttttgtatttttagtagagacagggtttcaccatgtggatcaggctggtcttgaactcctgacctcaagtgatccacctgcctcagcctcccaaagtgctggaattacaagcatgagccaccgcgcctggccgtagatgtggtcttcagtgtgtccccctcagcacccagacacttgagaactccgtggcagtgatgggccgagggacttgtgaggaaggggatgatgctctctgttctctctttgaagccctgggcatggacgccttcatcaaggccatgaagaaggttctgagcagtgtgtcggacgagatgctaaaggagctgtttttgaaggtggactcggactgtgaaggctttgtcacctgggtgaggagggtgcccctgcttcctcaggtgctggagggaggctggagggtccagtccttgaccagttggtggggctgaagatgggaggccatcacgatgtgggaaagcctccctgtggattctggccccagtcgggggacttgcctggtggagacgtccctcctaagacctgtgtgagctgagttcctggcagctcattccccagggacaagtgtcgttggcccctgtgtgagacctactgagtgtgcagcggtgaccccacctgccacgcggctgtggtgcccaccaacctcccatttggcttgggggattcaagctggtaccacgaccatctcatgacccttcactgtcactcaggaataggccagcctgtggctgttacatctaaaagtgtcaggcttttacagcatcataataataatgctttcatgtttttctggttctaaacgttcgacaatgggaatatacagctttttaagcatacagaaaagtaccaaggatagtctgacaaattgatgtagcaaagatgacaatgataactagcatttacaccaagcactgtgctaagctctctatgtattattttacttaaacctcataggaatcctatggggtaggtgctattacttacctctatttcggccgggcacagtggctcatgcctgtaatcctagcactttgggaggccaaggggggtggatcgcttgagctcaggagttcaagaccagcctgggtaacgtggtaaaaccctgtctctacaaaaaataccaaaaattaaacgggtgtggtggtgcacgcctatagtcccagctatttgtggagctgagctgggaggattgtttgagcccaggaggttgaggctgcagtgagctgagattgcaccactgtactccagcctgggtgacaaagtgagaccatgtctcaggaaaaaaacaaaacaaaacaaaaaacttacctccatttgacagattgggaaactgaggcatggggaagttaggagtttgcccagggcttcagactcatcagcactggagccagtattcaaaccagggagggtgccttgagagtccctgcgttaactgccgtctcatagctctcctcagcataggtatacattctgggttttcttcttctcaattttcttgtttttatttatttctttctttttttttttttttttttgagatggagtcttgctctgtcgcccaggctggagtgcaatggcacgatcttggctctttgcaacctctgcctcccaggttcaagtgattctcctgcctcagcctcccgagtagctgggattacaggcacccaccaccacacctggctaatttttgtatttttagtagaaacggggtttcaccatgttggccaggctggcctggaactcctgacctcaggtaatccacctgcctcagcctcccaaagtgctgggattacaggtgtgagccattgcacttggcggtttttatttctcttaatgttctataataaacatttcctttagaacaatgaggccaactgaaagaaaaagaataaaaagcaatttaaccccctcgcattcctagcattctcagggctttacccagtggtccttgtttacaaccccgtttcttgttacagcttcatatggtggctgctttgggccttggccatgttttccagcagctgggcagtggaatggagtctggagttgcgccagtggccctggtgtgggtgctccctgctgttaacttgatgtttgagcatgggcatctcacatccttacaggggcctgagttttattatccataggggagagtgaataaagagctcccagggtgatgccagttgtgggggtgatctgaggatgcacttagcgcctcaggacggcgagggagacgctgctgtgctctttcagtgaatgctgcgagtaggcccttcccatactcaggattcaagaacaggtctgctgtccaagcgcagtggctcacacctttaatcctagaactttggcagaccacttgagcccaggagttcgagaccagcctgggcaacatggcgaaaccccatctctacaaaaaatacaaaaattagctgggaattgtggcatgcatttgtggtcccagctactcaggaggctgaggtgggaggatcacttgagcctgggagattgaggctgcagtaagctgtgatcacaccattgcactccagcctgggtgacagagcaaggccctgtcccaaaaggaaaaaaaaaaggccgggtgtggtggctcatggttataatcccagcactttgggaggctgagcaataaactgtgatcacaccactgcactccagcctgagtgacaaacagagaaagagcaggtctgttgcttggccacctgccctggccagtacttgggaagcagccaccagagcctatcggaagggcctgggagagatggggtggtgagggggaccctgggaatcaggcttgagttcttttttttttttttttttttgagacggagtctcgctctgtcgcccaggtcggactgcggactgcagtggcgcaatctcggctcactgcaagctccgcttcccgggttcacgccattctcctgccgagttcttgaaactgaaggctgagaccattttgccaataccctgcctcccttgtgctttctttcgaggcagcaaaagtatgtggattacatgatgcgtgagttccagggaaaagaggacatgcgaaagagccagtaccgcctgcacttctaccttcccatgacggtcgtccccctgtaaggagcctcttcctgggccttggtgggtggggtgactggacaagtgctggtgccagcctgcagtgagcccctccctcaatccgtgaccttgctggtgctgaccaggggctggcatcagcctgctgcctgatgtcctttggctcatttcaacctcacagccctgtaagtgttaggactaaggtacgtgatttgtccccattttatagatgaggccactgaggtctggagaggtcaaatggctggccccaggccaataggtagaaagtggcgggctgctgtgtttggccctctcagcccccattccccagtatacagcattgcttcacctgcttcctgtgctagttggtgcagagtgggtctggcagtttcatcataggggcacaggtggcacaggtggccagcacaggcaggaataggagtttcctcccaggcaacaggaagggaattgctcctcaagcccccagccaggccctggaggcctcagagtggctggccccgggagtaggtccctctgttactcctggagctggtggcaccaccctgccttggcttctgcctgaccgctctgctcactcctcctcctcgtggctcctccacccgctgtgcccactgaacccttgctttgcaggggaggaaaactgtcttttccctctacccatctgaggttcattggcagggacctctctaagcgaagacagagtcacaaggacaagcatacaagtttatttaatataagttttacatgacacgggagcctctgtaggaaatgaagcccctaagaaacagataacctgagggttttcatgctaggttcaatggagggtggaaagctgtggaaaaataagataggacagaggggcgatgagccaagcgtaatacatggcggaaatagcaaggacgttagttcagattcttgtccgtgtccctgtgtctttgggcacccctcacatgagtcttatgaccggcttcaggggaaggtcagacagtccttcctgaacatactgcttctcaaattcctttagtttaacagactcagtatgctgcggtgccctatttgggggtagcatctctcagacccctcaacctcttctgtctgtgccaggggttgatctgcctcgctgtgtgttcctccccctggactccctaagcatgaggagcattgcaggggctctgacctgctgggcctgggctgcccgggtcactggatcccttcctgcagtccaccctggagcactgctgcctggggcaggtggccaggcagggagctgggtcctgagatacaaggtgtggcagcctacatttgtgaccaggtcaggagggagctgtgggtgggtctgtcctaagaggaccagacccagaccaggccacggggaagtcaaagagctggaaggcagccccggtcctcaggcagcctggggtttaatagagaaggcggcttgaatgaaagtcacccaagggtaacttttttttttttttgagacagagtctcactcagttgcccaggttggagtgcaatggcttgatcttggctcactgcaacctccgccccccgggttcaagcgattctcccgcctcagcgtcccaagtagctgggattacgaacgcctgccaccatgcctgactaatttttttgtatttttaatagagatggggtttcactgtgttggctgggctgtttgtgaacttggggcctcaagtaatccgctcaccttggcctcccaaactgctaggattataggtgtgagccactgtacccggcaataacttaaaacaaaattttggttgggatttaattgagaaataaccaataaatatgaatgataagagatttcataactgtattttttaaacatttactggtttattataaagaatattacaaaggatacagatgaacagatgtgtagggcgaggtatggggagagggatgcacaagcttcaggaacctccgtgtgttcagccatagggaagctctcagaacccagtcctctggggtttttagtggaagcttcatgacatcagcattcctgcccctagggcatagggcaggactctggggctgtgggagttaggaactgtgggcaaaacatatatatatataaaacaccacaggcccccactcctggtttttgaacatagagaacacagctcccttatagcaaaagaatacacaactcaaaagatactggcacattcctagagtcccatttagtcattaataattcatcccatccatcatagtatatgaatgtctcccaggctgaggccattcaggtttgtaggcttcctttcaatcttgtcaggttccaaaagccggagttggcttggcaaataaacctctcaggcatctggaatcattgagctaagagacaatgtcatctctcttttctttttttcttttttgagatggagttttgctcttgttgcccaggatggaatgcagtggtgcggtcttagctcactgcaacctctgcctcccgggttcaagtgattcttctgcctcagcctcccaagtagctgggattacaggcacctgctaccatgcctagctaatttctatgtttttagtagagatggagtttcaccatgttgaccaggctggtctcgaactcctgacctcaagtgatccatccacttcggcctcccaaagtgttgggattacaggcgtgagccaccgcatccagccagtcatctcttgctctgagaactccttcgagttgttggtgtaatactggatttctctccatttaatccatttattaatctttaccctcagctagtattcctccttttctccatttgtcatttatttttacccaaacttttcctcctttgcaagggacatcgggttcagccactgtgcctatctggatcattggtagcaaagctactgtagcgagtgcctcccctcagtccattctcattcatagagaatagggttacacgagttccaaactcgcgagccatttttaccatgagacaatatagctgtatttatttttaacccccattttgccagatgggatgaaggcgcaatccacccccatcaggcccttagggaattctgacaacgttttaaaacatggtgactgtttcttgcttagaaattatccctgcccaggcatggtggctcacacctgtaatcccagcactttgggaggccaaggtgggtggcttacctgaggtcaggagtcctggccaacatggtgaaaccctgtctctactaaaaatacaaaaattagctggatgtggtggcaggcacctgtaatcccagctactcgggaggctgagacaggagaattgcttgaacccaggaggcagaggttgcagtgagccgagattgcgccattgctgtccagcctgggcaacaagaatgaaaactccgtctcaaaaagaaaaaaaaaaacagcatgcaaatgcaattcagcccactgaggctgatcagtttctaccttctttgctgcaagtggcagccctccaaacagaatatcgtccattcactttgaaactgtaaacccagcatttcctcgttggtcacttgatagctgttcacggcacactgtccaagtgtcgacagaacccagcagcacctcacacagttccggaatcagtcctggggtaaagaggctcatagcctgtgagtatctcttgcttgcattccccaggtagcaagatgctgagtaaaccatttccattttattgtatttattttttgggattttatttttgagacaaggtcttgctctgtggcccaggctagaatgcagtggcatcatctcaggtcactgcaacctccacttcctgggttcaagtgattcttttgcctcagcctcccgagtaactgggattacaggtggccgccaccacgcctggccgattttttgttgttgttgttgttgttttgagacagagccttgctcggtcgcccaggctggagtgcagtggtgcaatctcggctcactgcaagctctgcctcccgggttcatgccgttctcctgcctcagcctcccgagtagctgggactacaggcgcccaccaccatgcccagcgatttttttgcatttttagtagagacggggtttcaccatgttagccaggatagtctcaatctcctgacctcatgatctgcccgcctcggcctcccaaagtgctgggattacaagcgtaagccaccgcgcctggcctagtttttgtatttttaatagagacgggatttcaccgtattggccaggctgatcttgaactcctgatctcaggtgatccacctgccttggcctcccaaagtgctggtattacaggtgtgagtcattgcgcctggccaaccatttccattttattatggaatttctggcctctgtaggccccattagagcatttctctgatatcacccaagacatctgggtatttcaggtttcaagataattttatatccttcagtcgtaggggtagcttcagttaatgtcccataacaaggtagtaaatgcccctcaagaggacattccctagtccaaagtcccagtagctgttgccgggaggcgcttacaggcttttgtcgtaagccccaggaaatgctccacagagggctatccagtggagaatttgtccctgccagctctctagcttctactctgcactgtgtgggcctgggcaatcttactggttcccatgtagcatgtccagttcatatagcttgaatggcgatttacatacctctgttttatagcagtaggaaggggagacattccctaattagatatagtgttcattcccatgatacaatcagataaaagcaaccatttgaacatgaagtatgttcaaatacataactgtacattttggcatgaacacattgcttaataaggtcaagccttcactggtctatttctttttttttttggagacggagtctcactctgtcacccaggctggagtgcagtggcgcaatcttggctcagtgcaacctctgtctcccgggttcaagcgattctcctgcctcagcctcctgagtagctgggactacaggcgtgtgctaccacacctggctaatttttgtatttttagtagagatggggtttcaccacgttggccgggctggtcttgaactcctgacctcaagtggtctgcccgcctcctgacctcaagtaatcctcctgacctcaagtgatccactcacctcagccttccaaagtgctgggattacaggcgtgagccactctgcccggtcaggtctttctatttctttgggccatttagatctcaagggtgtttaaaggtcctgaaacagaatgtcaagaggcttgttcctatattctcctatttatttgttcaacctacaaacccggagagcatttccaacttggtggggaaaataaatgagtaatatttaattaccttcatgaaagagtaacttaaaacattggcttacctttactgagcctgggccgggtgcaccaaatgcagcctctcatctgatcccatcacagccctaggaggtgcaggtgctgtcatcatgcaggtgaggaaaccaagtcctccctgagatggcctgtccttagggctgtcttcccttttcctagctgtcacctatcatcccattctgcacagtctttggccctgacagaagtggcagggttggaagagatgagagggcaactgagaatattcatcacaatctacccagagccatgggctgaggataggagagaggagaaccgtgtccagacacgtttcccttgctcttctgcagagatggtaatggcagttgaattttcacagtggcttgggttatccttaagcccagggtcagaccaggcctaccggatttggaaagggccctggaggaggggtcacagtgcctaggttctagttccagccctgctagtaaataggacataactccaggcaaatgattattccctgggcccctgtaggatgaggtaatatcacctgctctgccagggctcaaagattgggcagatcaagtaggagagtgtgtgccatgccatgccatgttgggaagctggagtggcagggactctcaatggccagatagctggcttagcccacttgggtgcagggaagcaacccacagaggggagcatcaaagcctgtatgaatgctcaagggcggcctcctgcgaggccaggcctgcccccggagctgttggctgtaggtttggtgtgtgggaccctaattccccactgctccttgtccactttgatttcatccttcggttctgttcccccctctaccccagagcactagagcagttgctagaaagtgctgtttctcagttttcagcctcaggctccactctgctcaccctctcctgggcagtttttcctatgatagaagctttgcgaacaacctccgttctgtctcctctgtcccatcacgtcgcgaggaggctggctggctacttcgcaggataagcctgctgcttctcacttctggagccccgcctcatatcagcttctacgtggggccctttttcttttggccactgttgatgatccagtagaaacccgcttggaagagccagctatgggtttatggcgtgcgcatgtgcgtgcgtgtgcgtgacgctccgccggcttttgtccctcctcctcggtggctctctgttctgccgcaggtgccccctccctgagctgtttttgcttgggctcttctctctttcatcgcctcccacaggaaccatggctgtgaggtggtgaaggtggtgtttttaatccaccggttcaagaagatcgggtgtttcctgactgtcaccaaagacgggatcctgcagttctggtctgagtccttctcgctgatgagctcctttagggtgagtggggcccctacacatggtgcacacatgggtgattggagagcctctgccttagcacccccatggtgaaggtgacctggagccaggcagattcatggtctaagcagcctggacttgcagtcacagcacctgggtcctgacttggcttcactgtgggagccacacatttcccttctgctaagcaggattccacctggatgtccattccctgtgggtgtctcacaggcccctcaaatccattagcccaaacaggtgtccctttagctgtccctgcccaccaggtttccttctcttgcgtccccatctcagtgaatggcattgtcatccccaagactcctgtgctaggggtcagccactcccacgctgtccccacgtcctaccgattcaggccttttgcctagtccaggcaggaaatcatagtggttatgagcatgggctctggagcccaaatcccagggtcagagtcctaactgtaccacctgcaagctctgtgacctggacaaggtactatatactccctgtgcctcagttttcccatctgtcaaatggggctagttacagtgcttctttacagtccttttgggaacacatgatgacataatacatgtgtagtgcttggggcagggcagggcacgcagcaagtccctgctggatatattgtctttgtgctgccagctcttggctgagagtagtaagtgagaagatgctcaggagaacccactgtgtacttggtcgccagggccgtccagaatcctccagcagacgaggaaagcactgctctccagggctctacagaaaggttgattgagaacacagcccccagatgaagggctttctgagcctgtgtaactgcagagtgattcacagttgcatcagggctcatcctttggggaagaagaggcctgggtggaactagggtctgtggggtcccatggctctccttggtgcaccaagggggagtcacgatcaccatcctgaggctgtggcttccatagccatccaccttacctttctgtgtgtggactggggcagggtgtgttgcagacagagctcctgcttgtggctgctacatggtcaccaaagcacctccaaaggctgaaggggacagaggaaggctctctgggaaggcgcagcaggcctggattcttcctggaggggccgctttggcaggagtaggcctcccaggaccacacacccactgtcatgcagatggagacacctcaagtttgaggcggggcctgagttccactcaagagctatgtgatcttgggtgcaggtcactgaaactccctagggctcttggtttctctgaatagtgcaagggttgggagttaccaagctactggtgtgtgggggttagactccagccctgggcaggagagaggggcttaggagggttctggtccattgtcttcaccgccagaaccacctggggagcccgagagcgcagtcctctgtgctcttggtgctctctgagttctgatggaacaggctcctctctgcccctgccttccctatcccttctgattatccatctagaggaattggtttacgctcctccctgctccttcctcccagcttttcagatcgtacttctttctgctttcttcagttcagagcctgtggtgtcattcaaagagtaaaatacagcgccaggcgcggaggctcacgcctgtaatcccagcactttgggaggctgaggcaggcggatcacttgaggtcaggagtttgagaccagactggccaccatggtgaaaccccgtctctactgaaaatacaaaaattagccaggcgtagtggcgcacccctgtaatcccagctacttgggaggctgaggcacgagaatcactggaacccggaggcagaggttccagtgagccgagatcgcaccactgtgctctagcctgggcgacagagcgagactccgtctcaataaaaagagagtaaaatacagattccttaggtggccacacctacctcatctctggttcctctccaactctaagccgagtgggctggcctccctcttccccaggacacagcagctcatttctgctgacctggctctgctcgtggctttccctgcctggagtgccagctcacattctgtctgtgcacatgctacacgagtgcaggatgcaccagtgctgagctcctactgagtgctgggcaccaccctcaatgcttcaactttcattattccattcattcctcgcaactttgcagaacaaattatcggttagtaagccaatttgaccaggtgacatctgcagatggaaaataggattcagacctatggaggggcagacaggggaagtcagtcttccttccctgagttcctacttcctctccctgcaggcaaatgctatgaccagttttggggtgctcttccatggctatcctctctacatatcccccttttctttctttttttttttgagactgggtcttgctctgtcacccaggctggagtggagtggtgcaatcacggctcactgcagcctcaacctcctggggtcaagggatctttccacctcagcctcccaagtagctgggactacaggcatgcaccaccgtgtccagctaattttttcttttttgagatggagtcttgctctgtcacccgggctggagtgcagtggtgtgatctcagctcactgcagcctctgcctcccgggttcaggtgattcttctgcctcagcctcccgagtagctggaattacaggtgagcaccaccacgcccagctaacttttgtatttttagtacagacggggtttcaacattggccaggctggtctcgaactcctgacctagtgatctgcccaccttggcctcccaaagtgctgggattacaggtgtgagccactgcgcccagccttttttgttaattttgtagagatggggtctccctatgttgcccaggctggtctcgaactcctgggctcaagtgatcctcccaccttggcctctgaaagtgctgagattacaggcgtgagccactgtgcccttttctttttaaatgcgataatggaagcatattataatgttgctttttaccttggtttgtcacttaatcatgtctcttggcagctctttattggcatgggcacagttcctttgttcttaatgtctgggtggtgtccatggtgtgggttgataatcagctgtgctttccaggtggcttctggcctgttgctctaatagcagctgcagtgtcccctttgagtaggtgcaaacacacccatagaaatgtcttggaaacagatccctggatcatgagctatgcatattcaagagtttggttggttttttttgtggggggcggggggcggacagggtctcactcttgcccaggcttgagtgcagtggtgtgttcacggctcactgcggcaagactttgatagaactgtgagactgctccagaaaggggttttaaagaaggtgttctttaagcccattttacgaatgtggaaactgagacccagggaggctagggagtttatccaaggcccctatcactagacttagtggtagtgctaggctccatgccaggtctgtggtggctccaggccttgtgtggcaggagaggttcatggggagctgcactggcctgagtatgcgtcccagcccatctcctctgctcttcctctggccagcttaaccagacccagcagctctacaaccagccgatgtgggtcattgacatggtatgtctgcacaatatgaacctcgttgcagttgcgtctaccaggcaaaagataggtgagtccctgggggcttcccagctctgctctcagccactgggagccatgcatttgtgcctgggagaagtctgttggctgagcaactgtgaacatggatcagagccccctgggaggatagccaggtggagaggccttagtgccaagtaggcagggggtggtcggtgaatgctcgaatgaatacagtgatgttgaacagacccaaatttacaagccagaggccatactggtccatctctggtcctgattctacctcctgcctcttgccactcctagtccaggcccccttcactgtcacttaaatagcctctcctggccgggtgtggtggctcactcctgtaataccagcacttcaggaggccgaggcaggcggatcacctgaggtcaggagttcaagaccagcctggccaacatggtgaaaccccgcctctactaaaaatacaaaagttacctgggagtggtggcacacgcctgtaatcccagctactcaggaggctgaggcaggagaatcgcttgaacctggaggtggaggttgcagtaagctgagatcgcgccattgcactccagcatgggcgacagagagagactcagtcttaaaaaaaaaaaaaaaaaaagcctctcctgcatgccgcgcttccctgatgcccccaaaggcaggatgtgcattacagtgccctctgcagaaagccttcaccctaccccagtgttcttaggatggaggtgggatcctcagtgtggtctgtgaggccttcagaggtctgagccctgccgcctccagtagtctccacctgtcccctccctgtggtgctgaggccactgtggtctcctctggtaggtgctgtggcctgggtctctgtgctctgccatccctcctgcccctctctctgccccaacagcctctgcttttcttttggctctcatctcagaagttacttcctccaggaagccctccctgaccctctagtccaagatcctctgttaaaaagaccccatgagattgtacctcttcccttcaaggtcccctttcagtgtcatctcacatgtattagtttgcttctgtttagcacatgtctcctcctccagactggaaggtcagggactgcatctgttctgctcaactcagtgtctcagtgcctggtaccttctggatgctcgatgactattgaatggatggatgatgaatgaggcctctgactgagcagacctgtaaggtggtcagggagagggaattagtacatgaaatgacagctggtgatgtgaggctgaatgggaggagagagagtggctgttctggaacaagcagggactggaataaaaaggacctgggttcagggcctggtcccactgctctgtagatgtctgcctatgagcaattgctttacctcccagtgcctcgctttacccagaggtaaaatggggcctatgatacatgactccagggtgagtgtggcttagtagttaggtgtgtgaagctgctggcatagtgcctggcacatagtgggcagttaatcaacactgacatcattatgaggctaaattgtgtgatacagagaaagtggtcagccgtcagcaagggctagagcaatctatctgtgacccgcctgggctttccactgcaacatctgtttcctggggacccagtgctgtcccaggcttcctcaccctttatcctcagacagccctgagaatttggtgttaaaaccccatttattttttatttttttgagacagtctcactctgtcacccaggctggagtgcagtggcacaatctcggctcactgcaacctctgcctcccgggttcaagagattctcctgcctcagcctcctgagtagctgaactagggattcatttattttggttgaaaaaaaaatattgaattctggttcgatgatgggctggacctggtctgctgggcccgtgtttgttggctcatcaggtgtctgggattacaggtgcgcgctaccacacccagcaaatttttgtatttttagtagagatggggtttcaccatgttggccaggctagtctccatctcctgacctcaggtgatccacctgcctcagcctcccacagtgctgggattacaggtgtgagccattgcagccagcctagaaccccattttagagataattatgtcatcactgctgtcctgatggagcagctgtcatctgctcggaggtactcagacaaggccaaaagcagaggtggaagtggcaacagtgtgatccccggcctttgtggccccagcccagtccagccagtgctccttttgtgacctacagccctctggggtggccggccacgtagagaggcagaggagggcgagaggctgccgttcagatgcgggagacaacatgacggtgaggctgttgctcatcagaggctggaagtgaggctggatctgttggaaggagtcagtttttttttttttttaattgagacagggtcttgctctgtcacccaggctgtagtgcagtggtacaatcactgctcactgcagtctcaaactcctaggctcaagcagtcctcttgccttagcctccctaagtgctgggatcatgggcatgagccactgcacctggcctgggattttattccagctgcagttggaagcctttggggattttcagtggggttcccggtgggtgggtttactctgtgaacagctgtctgtggttgccatgggggaaaaagggctgaaggggccagagattccttgggatagcaatgaggctgctcactgtgactgaagacctcccaggcatggctgtgggctctatgtggccttctgtctttcccccagatttctttgatattagtgaccacaaatgtgtccgggccttcacctttgttgatctggacagctgtgctctggtcatggactactggtgagtctccactgggtgttcctcacatgaaccaggaggcccaggcctcctgcagcagccgcatcactgactagggttggggcccccagaaagcctccttggaaagatctggaaatatctccccactggctccaaggcccctgtgtcttcctccccaccaggctgcttctctctcagggtcacctctcatggtcactcagagcttggagtcattgtcactcccccacccaagacagccaccaaatcccagcagaggcttgtctggctgtggctgaggactctggggacatcacagtctattgcgaggggtgacttaacaaagggcagctggaggactagggattcatttattttgattgagaaaaaagttgaattctggttcagtgatgggctggacctggtctcctgggcccgtgtttgttggctcctcaggtgtctgggcaaggccggaaagtgttgttggaactgcccttgcttccaaggaggagggaagctgttggggggccagggagggagtggaggctccacagcctcttttttttttttttttcttttttttatgactcagagtctcactctgtgtcccaggctggagtgcagtggtgccatcttagctcactgcagcctccacctgccgggttcaagtgattctcctgcctcagcctcctgagtagctgggattactggtgcccgccaccacgcttggctaatttttgtatttttagtagagatgaggtttcaccacgttggccaggctggtctcgaactcctgacctcaggtgattaacctaccttggcctcccagagtgctggtcttacaggtgtgagccaccgcgcccagcccacacaacctcttccgtctccatctttctgcaggtctgactatcacagaggtgtgttctgctatggagacgccaaaggcaacgtcattgtcttcacctccgaaaacatgaccagtgggctgttcaacccccgtatcctccccagggcctccaagtggggtagctaagatgctggggaagggggcagaggcctgggcatggcctagatgtgggtgctgaggtcatcctggtccccgagccccccactccctgcctctgctctggagtctctgggaaggcgtctgcttccaagcgcagggtgcatgccgctcagctcagcacagagggagaggcgatggggggcagcagaagaccacgagggctggggagaggggtggcctctctgaggatgggaggctgtgcgggtgcggtctgggggtgcaggacacttctcaccccagcatgatgccagtggtgggaccctggggaagtccttcatccactctgatcctgggtgagagcactgatgctaactaacttcctcggatggtggcgaggaggcatgtgctctccttggctctagtgctgcctttgggtgggcaggggctgtcctggatgtgggctctgtggagcctgggcatggcctggctggcatgggtgagtgggcacagctgagtctggagcaccccttgctgagcgctttgcatgcatcacctcccataatccgcccctactgtcaggagggaggagccgctgctgcagcccataataagaggcagaaagggtaaggtcacctgtacacgcccctgcctggtgagtgggggctaagatctgaagtccggctgcctgccctggagtctgtgcttttagccttttgctgggctgcatcccacactgattaatagcaggaggaagtcattggagctgttctgcccaggtcgctagatccccagaggatacggctcagggccgcctagggaactcatctgaactggagcctgtctagaatccagccttgcatgcacagtgctggctctccaggttgcctcacatccaccaggaggcccaggccaccaggggccccatgcagggccaccaaccccctcttccagccagagttactaagcaggacactccaggggttcccaggccttggtaacaggcccctggcaggcttgttggggcagcgtcccctgctggcagagcagggacagatcctgtcctggacacagcagtgggctggcaccctgcttgcctcattggcctcgggtgcctgccctgccctgagctgcccacttagctgcttgagcctagtcactctgcgccaccgtgggaactggcacgggaggttgtggtggtctttgagccacatggtgaatgggatattgagagaggcagatgatactgtttgggcaggagtccttccatgccaacaagtgattgaaggctagggacaaacatgacgatgaggtgggcccagtgtatggacttgggaggagatggacagacccaggtatgtaccccagctctgtgtgacctggagccagttgcttaacctttctgtgcctcagttcccttattcaaatagggatggccctacttccctgatagctttggtataagaaacgtggaacgttaggcacctagtaagtgcacagtgactatgctatgacttcttccctgccctccctcacagcctagtaggagagacaggcaggtaaactgatgattaaaccacagcgcatcataaagctgacttctgcctgtgcctgtgcacaaccagccccactctggcagtcttgggcaactttccacccctccctgggacttactttgcaagcttcctcctgcccttgcaagatggggctggtgactttgcagcagtacaatgtttggcatgagccgccagatccatccttgctgtctcttccctcctccatccctgggagggaacctgagcctagactgccccagcatttgtgaccgcctccttaaactgctctgacggaggacccatgtttgtccctgacggtgctggctctactcgtctgtgtcagactggctttgctttccctgaagatccatcaactgctggccttgaatggtttcagcagccgggagatgctaagccccatgagggctgcacctggcttgcctgaattcctccagacaggcttgttttattttatttaagattttttttttttttttttttttacattttgagacaaggtcatactctgttgcccaggctggagtgtagtggtatgatcatggctcactacagctttaatctcttgggctcaagtgatcctcccaccttagcctcccaagtagctgggaccacaggcacgccaccaccacttctggctaattttttatttttttgatttttttttgtagagatgggttctcactgtgttgtccagactggtatcttttttctttctttctttcttttttttttttttaaggcagagtcttgctctattgcccaggctggagtgcaatggtgcgatcttggctcactgccacctctgcctttcgggttcaagtgattctcccgcctcaggctcctgagtagctgtgattacaggcacacaccaccatgcccggctaatttttgtatttttgtaaagacagggtttcactatgctggccaggctggtcttgaactcctgaccccaggtcatctgcccgtctcgccctcccaaagtgctgggattacaggcgtgagccaccgtgcctggcccaggctggtctcttaactcctggcctcaagtgaccttcccacctgagcctcctaaagtgctgggattacaggtgtgagccactgcgcctggcccagacatgcttattttatgatgcatgcctggaacttctactttttggaacctgtgctttctggacaaggggtgcatgtagtttgaggcatgatggcaaactcccaagtgattacttttcagaacaaaaagagcctagagtctcaattccttctccactccagcaaagatggagctccctaatgaagaattagcttgtttagattgcagcacctaggaagcgtgaggtgccctgaaatctggttctagttctgccatgcactggcaggggcactctgggaggcagcagtgatctgcctgagtctttttcctggggtgggggcactccgctcagctcaccaggacacagtgaggtgccagtgagggtttgggtggaaaagccttttgagaagcacaggagttgcaagccaactcaagacgtcttctgaggctttgcttgccaagcgaagggggaaagctgctgatgtggaccttggttttttcccctatcagatcactggatcaaagtttccttgcagaaactcttaaatgagaagtctgctttgcatagaagctaccggctgaaggtgagttttttctttccttggcctgttacaatggtaattatctgtacacacacaccactcaaaataaatgcaaaaagtggatttactccctgggttcagtcttagcccttggggtttggtctctggaaacaggttgcggcagctgttggatcccgtcagctctatctgcagaccacatctctgtggccatgcccctctcactaccgccattgctaagccctggtcctggccgacaccgcctcgctcctggatggctgcagtggcctctagctgggttccccacttcctttcttcatgcagcactgtctccattcagggccagaggaatgatgagttagaaatacagttgagtcaccccggtagcttctcatcacatttggaacaaaatctcaagtccttaccatggccgtcaggacgtgaggtgatctggctcctgcttgcaagctctgggcttgttttcaaccttccttctccccatctgctctcctgcagagacgcaggctcctctgctgttccctgaatgggctcagccccttcccgcctctgtgcctcggcatgtgctgcgccttcaggccgcggggctctcccctaaggtacctgtattccccctatctacttcctgtggtcccaagcagccctcctaggacaaccctgtgcccacctctgctttcatcccttcacccgcagtgtttaccagctcccagctttgtgtggtccgaccattgattcctcatgctgtcaccttcacgagatcgacagctcctcaacggcagcggcttcgtgctctcggttgtctccagtgcctaaaatagtaccctgcgcttggtgggctcccaatacatttgctgcacaaatgaatgaatgaatgacgcactcagggcggtctgggtgatccaacaggcctgcactgactttttttttttttttttggttgagtcagggccttactctgctgccctggctggcatgcagtggtgcgatcatggctcactgcagccttgacctcccgggcttaggtgatcctcccacctcaggcccccgagtagctgggaatacaagcaccacacccagctaattttttaattctttttttgagacggggcctcactatgttgcccaggctggtctacctaccttggcctcccaaagtgctgggtttacaggtgtgagccactgcacccgctcttctgtcttctgtgggaagctcatcttgggcttggttttccctccaggtctcactcagtgtcttggattcggtgccttcattgcgacagatgcttggtgacagtgtgtgtaaaacccagctcagggtcttgcatgtagaaagcaccaaagaaatatttgatgagccaatctctccaacccgccttttccattctcgtcacagagaggaaaatctctagattgggaggccaagcactggtccaggtcacagagttggcgccggagaattcagagcccagccagccccttcgactgcgcgtcatcttttgtggttcaagttgccgtgaaatgcacattctcatgccctccgcgcttccttgagcactccacgctatgacaaacatggagggtggcagtgggctgggagcacagcccatctgtagagggggctccctgtggataactagattgtggcctggacagacttgaattcatcctttctctcctcgtgggagatgattagtatgggcctgaccttccccatcctctaactcacaagatttcaaatgaaagtaggcttgtgtgcttttaaaaattttcagtgacgagagatggccagtgctggtcataggacctgggctaggattgcggggccacatcactttgtgatcactaggagaagggcattagactccgtgatctctgggcacctccagtcccagcacctggtcatgttctgggggctgggcctagaaagttgtccttgggtggagtctcccaccattgctactgtcttcccaggctctccatcccaactggtgtgagcaggtcaagttcatcccccagatgaatgtggtagtctcctgttcagccatcgagaagtcctctctggtgctgacaatattgccagccaaagcctctaagaaacccaggtaagaagtgcttctctcctggctaaggcggtggggctggaagggaggggggtggtgagtggaccatgggggctgacagtggcagatggtggttggtgtatggactctggggtttagtttttccagcattgccagcagcagcacggtgagaacacagcagcctcttttatctcccaatctatatgcaaaactcagcatagaagccagcacagagtgattggcagtcagtgaaatgttttctgaatgaagggatgactgtgagttactttctcctctgtgaccctcagttccctcatctgtgaaagggtgtgaaagcacgtacctcacttcctgaagggttgcatgagggaatcctctgtggtatgtgttcagtaactggcagcattggttctttgcagatggttccaatctgtttccttcagtctagattcctctaccctagagtgaagttttttcttttcttttgaaaaactagttagtcaccgggcgcggtggctcacgccagtaatcccagcactttgggaagccgaggtgggtggatcatgaggtcaggagatcgagaccatcctggctaacatggcgaaaccccgtctctactaaaaatacaataataataataataataataataattagccgggcgtggtggtaagcacctgtagtcccagctactcgggaggctgaggcaggagaatggtgtgaacccaggaggtggagcttgcagtgagccgagattgcgccactgcactccagcctgggggacacagtgagactccgtctcaaaaaaaaaaaaaaaaagaaaaaccaattaatcacacaagtatgtattaaatgcattgtccatgtaaaaaatgaaaacattataaagaaggttggagtcctgaggggccccctccttattcaatcgccattccctgacccagttatcaaaagccaccacttctggttttttttctttttttctttttgtgacagagtttcactcttgttgcccaggctggagtgtaatggtgcgatctcggctcgccacaacctctgcctcccgggttcaagtgattctcctgcctcagcctcccgagtacctgggattacaggcacgcaccaccatgctcggctaattttgtatttttagtagagacggggtttctctgtgttggtcaggctggtctcgaactcctgatctcaggttatcagcccgcctcggcctcccaaagtgctgggattgcaggcacgagccaccgcgcctggcccacttctgttcttttactgtgtggcttctactgtgccgtttactgtggataaactggtaggtatgttctctcgcggagtcttcctgctgggtggctcttgcccctgcagttttcctccggcccctagtctttaccttgagcctttggggctctgacattttgcttctgcacaggctgaagattgagccccaggagagtctttttgggggaacagcaggagatttaaggcctgtattggggagagactgggtgaggccagggtggggttggggcagaaacagagggccatttagacccatgtctgtccctttctgtcctggttgtttttcaggggaaatttcaatcctgagatgataaggctaatttcgtccaactcctcattttacagatgggaaacccgaagcttagggaggggaagtgactgtcttagagcagacacttgagctggagttttatcttgggcctcattatatgtccagtgcctttttttgttttgttttgtttttgagacggaatcttgttgtgtcaccaggctggagtgcagtggcgcaatctcggctcactgtaacctccgccttccaggttcaagtgactctcctgcctcagcctccctagtagctgggactacaggcacgtgcccccgtgctcagctaatttttgtatttttatttttcattttttaatttttattatttttattttttgtttttttgtgacggagtctcactgtgttgccaagctggagtgcagtggcacaatctcggctcactgcaacctccgcctctcgggttcaagcagttcccctgcctcagcctcccaggtagttgggactacaggtgtgcgccaccatgcccggttaattttttttcatattttagtagagacggggtttcaccatgttgtccaggatggtctcgatctcccaaccttgtgatccacccaccttggcctcccaaagtactgggattacaggcgtgagccaccatgcccggcttaatttttgtatttttagtagagatggggtttcaccatgttggccaggatggtctcgatctcttgacctcgtgatccgcccacctcggcctcccaaagtgctgggattacaggcatgagccaccgcgcccggccgtccagtgcctttttaaccaaacagtgcactgtgtacatttctagacaagtcctggagctccctgcaggccggaaaaaggggcctccgggaatgtctgacgtgaaggggaagtttcagtcttgggttcagtgctttgaatggggccgtgtggcagaagtttgcttggagctgtttgctgaggctatctgtctgcattggtggtggtatcacttagtgtatattggggtgtccaatcttttggcttccctgggccacataggaagaagaagaattgtcttgagtcacacataaaatacactgacactaacaatagctgatgagctaaataaaaatcacaaaaaagtctcataatgttataagaaagtttatgaatttgtgttgggccacattcagagctgtcctgggttgtatgaggcccatgggctgtgagttggacaagcttggtgtataagatatgtgtttcattcagatcttgttttattgagtcctgatggcaggaggatatcagggggtcacctcaccagggccaggagggcctctgtgggccgggcctgctgccttcctgacctcattgcctccacctgcccactcagctccactggccttcaggctcaggcgtgctcctgcgccagggcctttgcacagctccgctgtctgtggtatgctcttgttattgattgactgattgattgattgattgattgagacagagtcttgctgcagtgcccaggctggagtgcggtggtgtaatcttagctcactgcaacctccacctcccgggttcaagcgattctcctgcctcagcctcccaagtagctgggattacaggcacgcgccatcatgcccggctaatatttgcatttttagtagagacggggtttcaccatgttggccaggatggtcttcatctcttgacctcatgattcgcccgcctcggcctcccaaagtgctgggattacaggcgtgagccaccgctcctggccttgttttttaaattaattaattttaaattaatattttcattataaaatgtttcaaacacacacaaaaatagataaaatggtataattcttccatatcacctagtagctagtccacgttaatatttctctaagtacctcagagtatcttcttacaatatttggaactagatataagcacggttctgggatggttttgagcagagaactggtgtggtctggcttatatgttgcaggtggagtgtccatgggcaggggtggtggtgaacacaccagtgaggaggccattgcaatagttgaggctgcataggatggtggcctggagctgggctgtgttgtgggatggagggactggagatgtatttttggggtagggtagagaatatatttacacacacaaacacagagacacatgttcccttccttcagcctgggtgacagagcaagaccctgtcttcaaaaaaaacaaaagactccattcaggtcagacacggtggctcacttctgtaatcctagcacttagggaggccaaggcaggaggatcccttgaggccaggagttcaagaccggcctgggcaatacagcaagatcccatctacacaaaatatttaaaaattagctgggagtgttggcacaccccatgcattcttgtctgcatgcagtgcaatgtacaggccggcaggtggcacaattgaccacttgctggtctcccgttttggcgatgccatcttagggcatatcctctgcgggtggggcctggcattggcaccccaacctctgcctctggagtcagcctcagcctccaaggcagtgtgggcctgagggtctggcttccttgcagccagcctcacctgagttctcagatggttcgagccaggagcaaatctgacggagcgggtgtggtagcaggagccggtgctgagtgtgtggactgacccccggcgtctccccgactgtcccctcttccttcacttctgccaccaccacctagttgaagccaccgtcatctcccacctgaactgcttgccctggccctcttagcagcctcaccgtgtcccctcaggccacatttcctgacccacggccatcaacaaatctgatccagccagggccctgtatggagccttcaacggctcctggccagggctgtggattgggccctgcccatctcgcccatgtcctctcatgccctctcctcctggcccacctggtgcccaccacaccggccttgcataggctgctccctccggctgaagcctcacccctcccctgggctccccggggctgactccttctcacccttcaggtctccgctgccctggaccctcctcagagaggccggcagaagtgagcctccttctgttgtcctccgtcaaagccatgtgcttatgtcccttgcaggactcgccatgatttgtaaatgtccatctcccttctgtgtgtccacttcctcctgttgtttccctctagaaggaaaaccccctatggcagaagcctcgtgtctgtgcccctggtaatcctggcaggagtaggagccaggaaatctttgttgatcaatacgtgaaatcggcctgaaataatttctactaacattttggtgaccattcttccagaacatttttcggcagcacatatacgtgtggagggaggaatatctggtttggcaataaatgaaatatgtgtactgccatctgttctctttgaagctttgatttttagaggaatccttgtgtctctggacagatgatttaaaggggagcaaggctggagatgaaggaactggctgggaggctgatacggcaaagtcaggggcctgggctagcagtggccatgggagtggagggaagtaggcaaggaggacttggggccaggctggataatgggagccacagtgttgtccaggttgatgcccaggcacctggcttaggccccccgggagtggtggaggagccgggtcaggggtgacttcagtggagggcatactgtgtcagggggtcgggtgccctactacagatgcctttgaatggattttttgggttttttttttctgaggcagggtgtcgttctgttgcccaggctggagctcactgtaacctcaaactcccaggctcaagtgatcctcctgcctcactttcctaagtagctgggactgcaggtgcaccaccatgcccagctaatttttaatttttttgtacagatgggatcttgctgtgttgcccaggctggtcttgaactcctggcctcaagggatcctcctgcctcgacctgccaaagtgctgggattacaggcgtgagccactgtgtctggcctgaatagagtctttttgtttttttcgtggacaggttcttgctctgtcccccaggctggagtgcagtggcatgatcacagctcactgcagcctcaacctcctgggttctagcaatcctcccacctcagccttgcaagtatttgggactgcaggtgcaccatcacgcccagctaatttttgttttttttgtacagatgggatcttgctgtgttgcccaggctggtcttgaactcctggcctcaagggatcctcctgcctgtgcctgccaaagtgctgggattgcaggtgtgagccaccacacctgaatggagctttttttttttttttttttttaaggcggtggcggggtgggggtactgagtctttctctgtcacccaggctgggagtgcagtggtacaatcttggctcactgcaacctccacctcccaggtccaggtgattctcctgcgtcagcctcctgagtagctgggattacaggcacataccactatgcctggctaatttttgtatttttagtagaggcgaggttttaccctgttggccaggctggtctggaactcctgacctcaggtgatccggccgccttggtctcccaaagtgctgggattacaggcgtgagctactgtgcctggccagaatggagttttgaagagtgtagtagaaggagctggcggggcaggatgttgtggatgagaggcatgggcataggcacagagcatctgcggttcttaggcctgtgagggctgcagggccctggccttcctggaactcctgtctgggcctctccagccctctgagcctcacccggccctaatgagcctctcctctcctggatcgctgcttactgagcttcctgccacctcctgccatatccaccctaggtctgaatcctgacccctgtgcgggaggagtaatattttttcttcacccattgtaaggtttatggctgagaccctgataacaaaaggcagatgaacaagagaaaagcatgcacatttaagtttcatgtgacatgggagccttcagaaaaaaacccaaagagacagggacgcctgtgtagtttcatgtgaagtttgatgaagaatggacggtcatgcaggacgactggactagtaccatctgatggcagtaaactgtttgtccagatccccctctgtgtccctgtgtcttcagaaataaggacattggggctgggtttggtggctcatgcctgtaatcccagcactttgggaggccatgggtggctcacctgaggtcaggagttccagaccagcctggccaacatggtaaaagcccatctcttctaaaaatacaaaaattagccaggcgtggtggtgtgtacctgtaatcccagctactctggaggctgaagcaggagaatcacttgaacctgggaggtggaggttgcagtgagccaagatcgcaccactgcactccagcctgggcgacagagtgagactccatctcaaaaaaaaaaaaaaggacattcctttcccctaggtataggtatagagtgggcacctatggaatcagtgttctatgacctgcttcagggagaaggctaggggaaggcaagcgtggccctcctgctgcttctgctgttgtctcaaatgccaagatgccatattttggggtagcatgtcctaaaccccataacccccattgtttgcaacctgtgtgaccttggggaagctccttgacttttccttttggtgtctctatccctagcgcagggcagttctattcttgggcattgtatgagatgtccagatgatgcaggagacagcaccctgcatggggaccacacgtagccagggtggggcacccgggagcttcctttctgtccctcccttggaaccccgcttttttcttgatttgtatcatggatgggaagatgcctgtcccagtacagttgatgtgaaaatcaaatttgcccttggaatgaggccaaatgctttacaaatgtcaggagtcgctcctgcctgggagctgtctctacctggaaggtggcatctggcctgtgggctgttggtttggggccaggactgggctgctgctttgcctgtggtgctgagccctgacttggctgcagggtgaaccctgggtggtctctggggctactcctctcctaggatggagaggtagtgactcctccctaggcctcctgggaggctctgcctctagctcctcccaccccaggctcagtctcagacgctctcttggggccactgctcccggccctgcagccctcactcctttgatattgtaggttgtcagtgctgcgtttaaggaaagggattctttgctttgattactgcccagacaggaacttcctgggtaagtcaccttcatgtcacccagaagctgctggggggagggctgctggggatggggggaccaccagagctcaggagagggctgcacagcatctggcctctgtctggcttcctctcctgctgctcttgtccccacttctgggcaccaccttcaccagtgggtgaaggtccccagtggaggcccctgggactgacacccacgtcttgaccacagtgactggtggctacgatgccttcatccgcctgtggaacccctttgtctcaaagaggcccgtgtggctgatgaagggacaccagacctcagtgacgcacatccttgtggatagcaggaacaacagcatcctcatcagtgtctccaaggacaaggtccgccccgacggtccgcctgactccttctgttcctcagggaaacacactggccagagaaatggcatgacctccctgcccacggccccacatctggccaaaggcctagcaggaggggccccgggtgggaggaaggtgagggtggccatggacctctgagcatgtccccagagctgggttcccaggtagcccagcctggcttctaactttgtgaccctggcaagtccttcccttttctgagcctcagtcctcagtctccctatccatagaatgggctgttgagtggtttagagaaccagcagcaaaacagcagtgcagtgtctggcacaggggagttgtgcaatgcatggcagccgttcccctgcgctgcccctgccctcgatctgcacctctcagttgctctagtgacccctcctcggctgcctggccatgagggctgggcttggcctttcccacatgccagggctcccacttgggacccgccactgtgctcctctgcagctgtaggctcaggatactgccccgtctgctgggctgtgggcccacagtgctgggggccctcctttaggggacaggttacgttttctggaactctggagatggagaattgtcagggccctcagggtcacctggagcaccctctccaacatatccacacaccctcctgtctggaattttcccagaagccctgggagctgggatcatcgcctctgatgaagggtctgagtctggggcatggggacagggacagtctcgctgaggtccccagtcggccatgggcagaggatgcctccaagaagtcagggtcttggagggacttctgtggggccctctagggaaagttcctccacctgggaggaatgggaggggcccctctggggacaggcaggccactgtggcaactatgttggtagccactaccggactgtgtcccaggctggagtggcagcaagggagggcctggggccagcatgtgctgcctggcttggcttttgtacccagccagtgaattcagctgctccaacagggtggaggcctgggggcaggctgggggtggagctgtgcccggccctcactcactgtgtacctgggttatctgagcacaagagtagcctctctgctgctgggtgtgacggtgccaacaccatgtgtgtgtgttagaagtgcttggacggacgatgtgccctggccttgttcgccggaggcacccccgaggcttcaggagccggctacatccccgagacccatgctcagcgtcttgcctttttcccatcccccagaatattcgcgtgtgggacatgctggactacatatgcctccagtccttctgtgggaagttttttgctctgggaaactgccccatcaccagtgcctacttcttcgagaaggacaataccctcatctgcagcacctactcagtgagtgctgtcccaggagggagtggggtcaaggccgcaggtggagggccagggtctgaatcccatgggacacccaaggggtggccacgtcctgtccctcctgggactgctgaagcggctagactctgtggcctggcctgtgaggggccgtgtcttgggatttcctgaaatcctgtttctaggcccccagcctgtcaccctctctgcagctgctgctgctgtctgcactgtccccactcaggcgtcctcagcctctccctctgggagccaccctgaacgtcaggcttgttaggagcccttcctccatgttttcttggccccgttccttgtctcagtcatgagcctcataactctgtcctgtcgctattacatgactgtttttcctgctaagtcatgaactttgggaaacaggggccacgtccgagcagcatctctgcaggagagaccctgtgggaaactgagtcacagataggaaggccatctgtgactcaggactcagctggaacccctgtgaggtctgtcctgaccctggaggacaggaaagattgggacaagcacgaggggcttcctgtggaggatgggggtaagggggcccacaagaaggtggaggcttggggagctgcaaggctgagccacaacccacagatgggagcagaagcccagaaaagagatgcgggggccgctcgtgcttgagctccaccaaggcctcccacgctccgtgggctgggccaccctggtcggtgacatgtgtgtcatccttacgcacttggctggccctcccctagacagcagttttcttgagaaggtagtgggttcctttatctccttgctgagtgccagacaggtggtcagcatttgctgaattaaataggcctttgaagttcatttcagagcaccaaaccttatcaaccccctgccttttgtcatgaacagagaatatatgacaaagacactgtcccatctctctaggaacctacagggtagaagaaaaacagataatttcggtagaaagtgctatgtgttatggtagagttgtgctttttggagcacagaggaatccttagcctcgcctggggcaagggggaggcagggagggcttcccggagggaacacctgattgaggcttcagcttctcagaagttataaggtgaaagggaccttggacttggaatttggggttctaggaacactagggtttggaaggctcagtctcggggagcgggggccatggagtagggtgggggtatctgcaggcctgctgaggaacctggagtcttgctggaatcaggcctgcgtgtggtcaggacgtcttgatgtcgtgatttattggaagtttttcccggcagcccatcactgtgagcagagcccttctgacagacaagctctctgcccctttcctcacctacagatcgggatcctaaaagggtacttagaggcccaggggcttatcaaagcaaggaagaggaccactcattgctcacccctgtgtgctgtcctctacagcaagatctttaagcaggtgagtggcccagggctcgcctctgaggctggcgggaacaccaggtgacacggggcagaaccagacctccctgtgtgcctgggtctgtagtcagctcccatggcacattgggaactcttacagccttgatggtggtgctggggcagcgggatagacacagaaagcagctctacagatgggctggcgtgggatcagctcagagctccatccgttagccatgggatcgcctaactcctctgagcctcatgcccttggctgagcgccttgggtcagctctggactgggccttcttgatgtggagtatgagacagagtgctagttgtggggcgctttcctaggttcccagagtgggtgctgttcttgggcatctctttgcagggaagccataacttggcttttttcattgtaggaagggacggaggcccaggcagcaggcagcaccttggtcctgcgtggagtctctgggttgggcagggcagctgggcatgaggagttgcttctgaggtgtgaggataggaggggctgctgcctgaggccctctgctcactcccacccactgggacctcttgtctggcccaggctctggacaggtgcgccgcatcggctgcagaggtggccttgggctgcacaaggctggagctcaccattctgggcttctctcccatcctggctcctgccaccaccctctctcactgcctcagggctcttcagtaccttaaaaaagtttgtttaaaatttaaaaaaattatcaacttttctagatcttctcagtagggagggttggtctgaaaccacctcacttgctacttttttttttttttttttttttgccagggtctcgctctgtcgcccaggctggagtgcaatgggaccttggctcactgcagtctctgccttccgggttcaagcgattctcctgcctcagcctcccgagtagctgggactacaggcatgcaccaccacccccagctaatttttgtatttttagtagagacagggtttcagcattttggccaggctggtctcaaacttctgacctcaagtgatccaccctcctcagcctcccaaagttttaggattacaggcgtgagccactgtgcccagccttacctgctactcttgcattataacaatggtcatggtggcaaaatgtttcattgagtggcatggctgtccttattctcaacagttccctacttagggggcagttagtttatttcttatttttttgacggggtggtcatgattaatgttgtttcagtaatgtcttttccatatagggattattttctttggctagatcctgataagtgccatttctgagttaacaggtcttcaccaaacgttccagtgcgttccagtttgcactgccctgtgatacagggcagaggaggtcctgttttcaaaagtggcttatgctgtagcagggggccctgaacgtctgttttctcagtggatggaggggaggggccaaggcaggctggagaccacccttgggagtggaggccccggcctctccagcagcccccagctgtgtgctccctacaggtggtgagtggctgcctgcgcggcacagtgagtgtgtgggaggtcgtgacgggcaggaagacgatggagtttgctgtgtctgggggccagcacgtggagatgaccgccatggccctggatgagtcagagcggtgcctgctcacaggtttgcgggatggcacaatgaagatgtggaactacaacattggcaaatgcctgttgacctttcccagtccggaacagctggaggtcagtcttgcttgtcaattacagccagggacggcctcttgggaagcaaagcacagctcctttgaccctgggatgcactattttttgtacctctctgaaagggtgttcatcatagtcaggtggcctggcttcaaacctccctgagcctctgtgtcctcatgcatgaaatgaagacaggtaacagtgcctggactaatgggtttccactaaggttagctactgttgctctttaaatttgctagcacttctcattccacatactggagctttggattgcatttctagcagtgggatcagttaattcacagccacccatggtcacccctatttgggaaatgcctgatggtattatagggccagtccatgggagtggcatagggcaaagccagcagttccaccctaacttctgtgacacagtcctttaaccaactcagaaagtgtacttagctggccaggcagtggctcacgcctgtaatctcagcactttgggaggtcgaggcagggggatcacctgaggccaggagttcgagaccagcctggctaatatggtgaaactcccgtctctgccaaaaatacaaaaaaaattagccaggcgtggtggtggctgcctgtaatcccagctactcgggaagctgaggcaggacaagccgggaggtggaggctgcagtgagccgagatcccgccatcgcactccagcctgggcagcaagagtgaaactctgtcaaaaaaaaaaaaaaagaagaagaagaaagaaagtgtacttagccaagatgccaggggttgagtactgctccagatcctatcactcagtagtgacttgaccttagccaggtcacttgcccatttcccagctatcctctctgtaaaatggacatggatgcctaccctatctcactcccctaagtccatcaaatgagggaataggatgtgagaacatgatgacaaatacatggtggtatcacctgtaggtgattttcgtcatccagagatttgacttcttgcttggcacctttaggaagacatttagggcccagagccattttctctgataagttttctagttctgttttctttcatcttcaacagattagtgggattatccatatgaacaaagtgttctatgtgacaggatggagtaagagaatcactcatttcctgtgagtagaaagcatgtatggtgagtaggttccagtagctgcgtgttctctctccagatgggttcctccattcctggctttcctggtggttggaacaccatgcaggaagttagtggtggttaatgactattgcttcatctgctcatccatccatttattcattattcattgaggctaatatattcttggccttttgctaggtgcctgggatgggtataaacaagaatattggagtcttcatcctcctggagtatctatttcagtgggggaatgtcttagtccattcgggctgctgtaacagaatatcatagactgagttgcttataaacaacataaatttatttatcagagttctggagatgggggaagttccagacaaggtgccagcagatttggtgcctggtgagggcctacttcctgattcatagacagctgtcttcttactgtaaacttacatggtggaagggttaagaaatctctctggggcctcctttataagggcactaatcccattcatgagggctccatttttgtgacctcatcgcctcccaaggccccacctccaaatttcctcgccttagggattacgtttcaatatatgaattttgggagcaaaattcagtctatggcattccgtccctgacttcccaaaattcatgtccttctctcatgcaaaatatattcatttcatcccaatagcccaaaagtcttaacttgttccagtatcaactttaatgtctaagtccaaaatatcatctaaatatcacctaaataaaatatgggtgagtctcaagctacaattcattctgaagcaaatgcccctctagctgtgaacctgtgatgctaacacgttatgtacttccaaaatagaatggtggggcaggcataggatagacacaagggagagataggaaagaagaaaggagggacaggtcctgagcaagtcaaaaatccatcagggcaaatgctagtagaccttaaatctcaaagataatcctctttggcttgctgccctgcccttcaggcctgctggggtggcaattctgcccctgcagctttgcctggcaagtgactggaaccctaagactctgggcagccctacacctacagatttggggagccttgcccccatggtggctctatgcctgggccctgcccctgtggcacttccctgcatgagccccctggccctgtggggctgcaattccaaggctgtggctctgctgggagaccctgtcctttgaaatctaggtggtggaggcagccatgtcctcccagctctgctgagtgcagtccatgctgtaccatggtccacaggagccacacctagagtggtcaaggagcatgaagaatggtgcctgtgaagttaagcgatgatggtagagtgctgtggtcccatgggcactggtggccattcccttgaaaccattctgcccccagagcccttgtactctgggctggtgatgggagggacagtcctgatgatctctgagttgccttcagggtcattctttcattgtcttggagaacagcactggcttctgttgggttggctgatccatactaatctcatcaaacagtgcttggctatgtctttaatgattgtattagtttgttttcacactgctataaagaatgcctgagactggataatttatgacaaaaaagggtttaattgactcacagttgtgcatggctaggagggggcctcaggaaacttacaatcatagttaaaggtgaaggggaagcaaggcacatcttacatggtggcaggagagagagtgcaagggaaactgccacttttaaatcatcaggtcttgtgagaactcactcactatcacgagaacagcatgagggaaactgcccccatgatccactcacctcctaccaggtccctccctcaacatatggggattacaattcaagatgaggtttgggtggggacacagagccaaaccatatcaatgttctttcctgaacagcctttctcattcctttctatatggataggatgaatcttttaagttctgcttccattttttttttctttaagacatgggatctcactctgtcacccaggctggactgtagtcatgcgattatcgctcactgcagcctcagctcctaggctcaagagatcctcccaccccagcctccagagtagctagaactacaggcacatgccaccatgccttgctaattaaaaaaaaaatttttttatagagatggggtcttgctatgttgcccaggctggtcttaaactcttggtttcaagcaatcctcctgtcttggcctcccaaagtactgggttacaggcatgtaccactgctcctggattctgcttcctttttgattaacagtttggtctttaaaccatttgtctcttgttgcattttattataagttgtcaggagaaaccaggaactccttcaatatgttacatagaaatttgctcagtcaaatatccaatttcttatcttgcaagttctacctgtctcaaaacactagaacacaaatataattcagcaagttctttgccattttgtaacaagtatgacctttcctctagtttccgataacatgtttctcatttcttcaccagagacttcaccagaatggtctttaacatccatatttctaccaaaattctgttcaggattacttaggtattctctaagaatattgaggctttctctgcatctgtcctcttttctttctaggccctcactggaatcacccttaatggtctatgcatagcaatgcaagctttttctagcatggaccatccatcctctacctattacctactttttttttttttttttaagacagagtcttgttttatggcccaggctggagtgcagtggtgcagtcttggctcactgcagcctccgcgtcccgggttcaagtgattctcatgcttctgcttcccgggtagctgggattataagtgtgtgccaccacacctggctaattttttgtatttttagtagagacagggtttcatcatgttggccaggctggtcttgaactcctggcctcaagtgatccacctgtctcagttcccaaagtgctgggattacaggcatgagccaccctgcccagctgctgttacctagttctaaagccacttcccacatttttaggtatttgttacaataacaccccactcctggtaccagtttctgtctttgttcactcaggctgttataacagaataccatagagtaggtggcttataacaacagaaaattatttcttatagttctggaggaagttcttagattaaagcactggcaaattcagtgactggtgagggccacttcctggttcatagatggccattttctcacatggtagagaggacaagggatctctctgggcctcttatttttgttttagtttttttaagagacaggatcttgctctattgcctaggctggagtgcagtggcataattacagctcactgcagccttgaactcctgggctcaagtgatcctcctgcctcagcctcctgaatagctaggactacaagtgtgtgtcactatgcctggctaattaaaatttttttttgtagagatgtggtcttgctctgttgcccaagctggtcttgaactcctggcctcaaacgattttccttccttggcccctcaaagtgctgggattataggcatgagccaccatgcctagcctaggacctcttttataaaggcactgattccatttatgagggttttgcccttctgtcctaataaccttccaaaggccacaccttcagatactctcacattgaggattaggttttaacataaatttttggagaatatgaatattcagtttgtatcaagaaggcaggtactaatcaaatattaatactttcatttataattataaagtatattcagtgctgtgaaaaaaaagtaggagtttctatgggggttgaatgggtggaaacctgatttcttcttgggggcggtggtcaggaaaggctcagtgagggtgttgtgggtggagtgcaatctgaagcgtgagaaggaagggtctctgtgaagtctttagggtaggatgagcattccaggcagaaggcacactatgttcaaggtccctttctttttagggacctctgtaaggccacaatgtccccccccctttaaaccttaatccttacctaggtgtctgactgggggtgtattacacattgactatctgtaagattagtttatgtaaagcccctacaacagggcctttgtagaaagcatgtagtaagcgcttagtaaatgaggtcaatgggacatggcttcagcccagctccgacacctgagagtatcctcctctgagtcggctcccagaatcctcaaggctccagtgcttccccaatggatggagcattacaggctgagctctcagccctcctgcctctggccatatgcacaggttccacaagaccaagccagtgctcttgtgctaccactggcagacctaccacacggaggacatcctgagcatggccaagtaccggaaccagttccttgggacctcctcctacagtggggacatcctcttctggaacaccggcacactcaagcccatcttcaacttcaatgcctctaggagcccctcgcccttgcagcccaagagggtatgttaacaggagcacactctcctcccacccttctctcagctgtgaaccagaatcctgtggggcagggagggtggggagcaccctgggaagcaggagggatgatggcgacttgttctggatggggtggggagcttggttaggtaggtggtagtttctgtaattatcctcattggacagatgagaaaatggaggcacacggagatgaagcaccttgcctaaggtcacacagccaagaaggagtagacccaaacccaggcagtctgacttcagaggctggcagtgctggtcctccatctttagtagattactcgctcctttcccattgctactacacattaccactgtgggctccccagcagggacttaggaaacccatacagtctccaaattcccatatctcagcagatcaaagcaggaagggaccttaggggccgcctcatccaggggttttccaaatgtactggagagagatgcttggaagctactgcaggggggctctggtaggtggggtttcccccagaatagctcagctttttatctgttttatgctttggagcttccattgagattaaaggtagcctcaaaaatatttggaaaccactgtccattttacagatgagaagacttgagttcctcatgggagcagtgtcctgcctgtgggtactcagggcattgcagctggccaggaatggggttagaagctctggtctgatgcctttaagggggctaggtttctgggaagcaagccctggggggctggagggccctgtggtgttggcattgatctggggcagtcctgaatttacctctacgacattgcagtgccttaggggctgctttcttcttggtacaggtgcaagatgtgaacaactgcctggctgagagccacaggcccagcagaccctatgtggagcgggagaagtggacatacaagacctccaggaagctctccagtctcagccccgagtctgtggccaataccaacctgaggcggagcctggtgtcggctcccccagtgatgcggtgcccgagagacaaggagccagacaggcctgtgccccagcaggtgggagcgagagcccaaccagaaggctaccctcactctctagccgccggcgttcacacaccgtctgtgtgtgtgttttcttattgggatgtactttttccaaagtgcctttaggtccctcaactcacttgttttgagcattgtgggcctgggcagggcaccctctggttttagtcccaatgtatctatcctggagctggggctaggtccctttccagggcatggctaataccagccctaaaagtctgaaagctgaaaggcaggacccaaagagaacacaaccctgaaaacctaaaattggatgttagatcctgggctgcattctcagtcctcaagggcaagtcacctgaccttggcccaggtgcagagggagccatggggtctcacctgcttggagaccaggctgtaagagtctgagacccagacacagacaaaccactttcctcctcctctgagcctcatctctgccccaggactagcccttccaagaatggctgacagttctattttgcggggagtagggagaaagagcaggaggagttactgtttccctacttgcaggggatggcttgcctttgaactttcagcagtgagtacagtattccaacaatcagtgcaataatctcttgtatggggcaggaggaaccagtgagattgttctcgtagtcaaaatctgatttccattcctgggagctgaggcttgagtgagaaacaccaccgtccccaaacacacaataattgctaggcatagggcagtctagacctaaatccaacatggtctgctaggatataattttgctgtaagacgtgtacacttgaccataagacattcataccatctttgagttatcagaggttacaccactgttttcaaatcttctagggaaatgggtgcataggtatatttgcccctctatccttatttttatttttattttttgagatggagtctcactctgtcacccaggctagagtgcagtggcgtggtcttcgctcagtgcaacctctgtctcctgggttcaagcaattctcctgcctcagcttccctagtagctgggattacaggtgtgcacaactatgcctggctaaattttttgtatttttattggagacggggtttcaccatgttggccaggctggtctcagactcctggcctgaaattatctgcccgcctcagcctcccaaagtgctggaattacaggtgtgaaccaccacgaccgacctttatcctcatttttaaccaggatggtctcttccaggacaaaggaagcatcttccccagaggcaaactcaagtctctgccccaattttgctctagcaaaattgctgggagcttaaagtggaggtttccgggatccactgagcgctgcttttcccaggccagtgtacctactgcgggggcttgggagtgccgctcttttatcatcttcctctggtctctggtcccctatggggaagggaaacaccctcatggtgacttgggtgcccatctttctttccagaaaccttccagtgcttctggcacatccaggcagtcaagcaagatccacagcaaacagtccatttacaaagaggatgaaacgagaaaaggagaatggcagaagaatatgttggttcaatccagtgcctcggtggagaaggttggccgtgatcagccagggagagggatatgagctggggagtgggcggtcaggattgggtggtcaggatggggctcgggggcctgggctcggggcccggcctgattctccccagtgcccggaaggcatcttggagaggatggagacgctcaggatactggagtcagggctgcggtgtctggggagagctcctgtattaattcgttttcatgcagctgataaaggcatatccgagactgagaagaaaaagaggtttaactggacttatagttccatatggctggggaagacctcacaatcatggcgggaggctaaaggtgcttcttacatggcagcagcaagagaaaatgagaagcagcaaaagcggaaacccctgataaacccatcagatctcgctgagacttgttcactatcatgagaatggcatgggaaggaccagcccccatgattcagttacctccctcttggtccctcccacaacacgggggaattctgggagataccattcaagttgagatttgagtggggacacagccaaaccatatcagctcccaaggaggtggagttggggtgcctagggaagtgagcagtgtcccctctggattgggggtaacagtgtcccctctgggaggggaggtagggaggtaggagaaggggcatctccagactctagttagaatgccctcctgttaactggaagggtgttttataccgaacacgagttgggtatgggttcatctttgttcttcctactgtaccttcccctttctgaccctggacacccctcactgtgatactgactccccgtcctgaaaatacaaatcatagttgagttagggtgtggctggcctgccccatcacccaggtccagggaccaggacttgagaacaagagggcagtgccctgagagctgggttttgcagtgttgggagggagagcaggagtggctgcacactctcctccaggttctgattatttctctctcctttttttttcttgagacagggtctcactgtcacccaggctagagtacagtggtgtgatcacagctcattacagcctcaactcctgggctgaagggaccctcccacctcagccttgtgagtagctggggctataggcatgctccattatgcccagctattttgtgtgtgtgtgtgtgtgtgtgtgtgtgtgtttttgtagagatggggtctcactatgctgcccatgctggtctcgaactcctgggctcaagtgatcctcctggctcagcctcccaaagtgttgggattacagatgtgaaccattatacccagcctcttccttctctttaaaaaaataccttagataacttttaaaagtaataatactagtttataataaaaaaggaagtgtatgtaaatgaaaaaataaaaataaaagtcccctatatctcactcaccctatcccatcccactctcaacagcagcattcgctgctaacaggttggttttagccttgtacttttttttttttgactagtaatataaaatgatagctatgtcctgccatatgcttttttctgtaagtctatagcatggatatactttcatgagagggatttagattcatcttattcttttgttaccttattctttttttttttttttttgagacggagtcttgctctgtcacccaggctggcgtgcagtgttgcgatatcagctcactgcacctctgcgtcctgagttcaagtgattctcctgcctcagcctccagagtagctgggaccataagcatgtgccaccatgcccagctgcttttttatttctagtagagtcggggtttcaccatgttggccaggctggtcttgaactcctgacctcaggtgatccactggcctcggcttcccaaagtgctgggattacaggcattagccaccacacctggccatcttattctttttaacaactgcccactgctgcataacttggatgcatcaggaactgtgaagctggtcctctatgaataggtctgtgggttagttccagtttttagcttttaggagcagcactgcattgaacattcttgcacgtacatttctgggcactagtgtgagtatattgagaggacggattcttggaaacagaattgccaacagatcccatctctttaaatctgtgaagtcaaggtagatggctcaaagcttgatcttttgggctagtgacctagtgctgtcaggacacaggcattcgctacatgccagccgctggggaaggagcagtgaatgaaagatatcaagcccctgacctctggagctgtcattctagttggggcaagatagacaattaaccagcaaataaaataaagggcatgtcacagagtgagtgaggacaatggaggacaagaaagccgggaagatggcagggagaacagacatgggaggagatggcattgctgttttatgaataggctggtcagggagggcttcacagaggaggtggcatctgcatagagcctgaaggaagcgaggaaacatggcctgcagttatttggaaggagggtgatgcaggcagagaaggtaggtgcaagggcccacatgggagagctggcatggaatgttcgagaatgagtacttctctctctctctctgtatctctctctgatactttcttcctctaattagaaagtgatacatgtccttaattaaaactaaaaaaattcaggccaagagcagtggctcacatctgtaatcccagtcctttaggaggccaaagtgggaggactgcttgagcccaggagttctagaccagcttgggcaacatgatgagacctcatctctacaaaaaattaaaaaaattagccaggtttgatagtgtgcacggtgcacccagctccttgggaggctgagttgggagaatcacttgagtctgggaggtcaaggatgcagtgagctgtgattgtgccactgcactccagcctgggcaacacagctagaccttgtctcttaaacaaacaaacaaacctggcccagtgcgatggctcacacctgtaatcctagcactttgggaggctgaggtgggcagattgcctgagctcaggagttcgaaaccagcctgggcaacacggtgaaaccccgtctctactaaaatacaaaaaattagccaggggtggcagcatactcctgtagtcccagctagtcgggaggcagaggcaggagaattgattgaacccgggaggcggaggttgcagtgagctgagatcgtgccactgcactccagcctgggtgacacagtgagattcgcctccaaaacaacaccaccaccaccacctatgaaaaaaaatgaaactttatacgagtgtataaagtaaaagaatggctgtctccctcctcagcctccagaggtaattacgttaagacatgtgttgtagccttctagaatttttttgtgcatatacaagtacatacatgtatgaatgtatatatataaatctagatatttttcactggataatatcatattgcatgtattattccgggacttgctgtttttcacttgactcctcacgggcatctcttcatgacggtgtttacggagccatggcattccttttactagtcacatcatgtcctgggtacactgcacagagtctgtatagctatctgctgccgctgggttttgcctctatagaaagcattgcaatgaatacccttgtacataaattttggatctcttgtctatttccagatataaaactctaggattagaaacatactcctggaaagcttttgctatcttgcattatgtttcagtggtagctagtaattattgagctctcaatatctgccagacaatgaacttaatggtttacatgtgttattttttgttttttgagacagaatctcagctctcttgtccaggctggagtgcagtggcacaatcacagctcattgtagcctccacttcccaggctcaagcgattctcccacctcagccttctgagtattaatagctgggaccacaggtgtgtgctactgtgcctggctcattaaaaaaatatatatttatagagatggagtctccttatgttgcccaggctagtcttgaccttctgggctcaagcgatcctcctgccttggcctcccaaagtgctgggattacaggcataagccaccatgcccagctacatgtgttgtttttattttgtccatcaaacagccctgggaagtatgtactattattatttatttatgagggatttttatttatttaatacatctgaaaagaatgtatgtgaaaagaatgtttaatacatctgaaaagaatgtactattattattattcccattttatggctgaagaaacaggcccaatgaggtgaagtgacttgcccaagattcttatggccagaaaatggcagagccagggcctgattctaggtctatttgttttcaaagttcaagttcttttaagtttttgtgctgccactgttgggaattccttgggctttttacgtggcctggtgatctgtgtgtaataaggatttgtatcatgaatcttgattgaatttttggccacagaattgcatgcaaaagattgaatgtctattggtgagatttgaggcactgtggctggcagggctgtgtgtgtgtgtgtgtcccctctggatgctgaccctcacccctggcttcaagatgtactgtctcccacccgcaccactccttgaggagcagggtcccttctctctggggcacttgtgggcacagtgaagcattttagggtggtgccctggagagggtccagagtgcttgggtcatctctgatctcagcctttccttagtggaagagaggcttgggtgggctggggtaaggacaccagacagggagtgggtgggggtcttacctgttgggtcttccttcccattatttctgtctggccatcccagaagactgtgaggcatggcagaaagagcactaggaaggagtccaggatgcagatccaggcccagctgtgtccctgacagtctttatttttaattttacttatttatttatttttgagatggagtctcactctgttgtccaggctggagtgcagtggcgtgatctcagctcactgccacctctgtctcctgggttcaagtgattctcgtgcctcaacctcctgagtagctgggattacaggtgtgtgccaccacacctggctaattttgtgtttttaatggagacagggtttcaccatgttgtccaggctggtcttgaactcctgaccttaagtgatcctcttgcctcagctttccaaagtgctggcattacaggcgtaagccaccacgcctagctaattttgggtttttagtggagacggggttttgccatgttgtccaggcttgtctcgaactcctggcctcaagtgatcctcctgcctcagcctcccaaagtgttgggattacaggcgtgagccacggcgcccagcccctgacagtctttagatgaagcacttgcccctggccatctccccagtagggaaggaccagatggcacgcagtagaaaattgctccaagttacatgaagtttagcccgtgagtagcttgccatggctccttctgaagggacccacagggaggccattaacccgctgtggttgagatactatctgggattcctgggctgagtgagactgaaatgctcaccttcagtccagcagctctttccaaaatgagcagggcaatgtattggatggggctggatgcagagtgcaaaaggaatagtgttggttacctgtccctcgcagccacacggctctgtcctgcctagggccaccattctgactgtgcttttctcactgtgagcaccggatgctggctacgcagttgaccctgtgctctcagcaggccgcccctctccagtcctgctgaagtcctgggcgctcattcaccttcaccctacctgctctcaccgtcccagggctggcaaaggaatggctgggaaggatgcctcagcttttccccagttcagacatgggagaactttgtggtgcatcactttggtgaatcctgtgcagttatgaggaaccacattttagaaaaatacttaatcattggaatgtgcttatgacaaaatttaaagcacatcctttaaaatgacagttaatgactactgtgaaagttgtgtgcacgttaaatttttttttatggttttgatttttcaaacaaaactgagaacgtttgaaactattgtttatttagctgtttgcttttttttttttttcaaaccttgcaatttgtggtggacagtttttcctctcagcacataataatctatccacttcattctttttttttttattatactttaagttttagggtacatgtgcacaatgtgcaggttagttacatatgtatacatgtgccatgctggtgcgctgcacccactaactcgtcatttagcattaggtatatctcccaatgctatccctcccccctcccccgaccccacaacagtccccagagtgtgatgttccccttcctgtgtccatgtgttctcattgttcaattcccacctatgagtgagaatatgcggtgtttggttttttgttcttgcgatagtttactgagaatgatgatttccaatttcatccatgtccctacaaaggacatgaactcatcattttttatggctgcatagtattccatggtgtatatgtgccacattttcttaatccagtctatcattgttggacatttgggttggttccaagtctttgctattgtgaataatgccgcaataaacatacgtgtgcatgtgtctttatagcagcatgatttatagtcctttgggtataccacttcattctttttaatagctttatatagggacctatctaggttttttggagcctaaaacttttgcaagaaaaatgcacaaaattataaaaaattaggtacaaaagtgaatatttatttagaatgagaaaaaagtgtcaacaaatttcaaaacttataaatctgacaattacaaaagtcaccagaacttaccagttctttcctagaaccttgaacttaaacttgaacttagccttgagcttcatgaacttcacgagtaaatctgccactggctgcagtgtatttctttggattcaccatgatttgtttatttatttatttatttaatttaaaatttttttgagacagagtctcactctgtctcccaggctggagtgcagtgacgtgatcttggttcactgcaacctccgcctcccaagtaccagcaattcttctgcctcagcctcccgagtagctgggattaaaggtgcccgccaccatgcccagctgatttttgtatttttagtggagacagggtttcaccatgttggtcaggctggtcttgaactcctgacctcaggtgatccacccgccttggcttcccaaaatgctgggattagaggcgagagccaccatgcctggccaaaatacattaaagtcttaatggtgattatttctgggtactgggattttgtaggtgattttaatttcctttcatatgtctatgctgcccacattttgtacagtgagcacttgcataaagtgggggaaatgcttgccctttgtctttggttcagggattcctgttttttctttttttcaaaaaatttttcttgtagtgaaatacacataacataaaatttaccattgaaaccatttttaagtgtatggttcagtggtagtaaatatattcataatgtgcagccatcaccactatccattcatcttgttaaattgaaactatacccattaaaaaataactcccactcccctctccctccaaaccctggaaacccccattctactttctgtctttatgattttgactattctacctcatgcaagtggaatcatatgtttgtcttttggtaactggcttatgtcacttagcataatgtcctctttgattaattcccaagtattttactctttttttgacactattgtcaatggaattatttttgtaatttccttttcagattgttcaacgttagtgtatagaaatgcaactgattttttatttttttttttttgagacagagtcttgctctgtcgcccaggctggagtacaatggcacgatctcggctcactgcaccctctgcctcccaggttcaagtgattttcctgcctcagcctcatgggtagctgggattacaggtgcatgccaccacacctggctaatatttgtattttttagtagagacgggctttcaccatgttgaccaggctggtctcgaactcttgacctcatgatccacctgcctcagcctcccaaagtgctgggattacaggcatgagccaccgcacccagccaatgcgactgatttttatgtgttgactttgtatcctgccattttgctgaattcatttgttagccccttttttttggtgtgggagctttagcgttttctacatataagataatatcatctgcaaacttataattttacttctttctttccagtttggataccttttatttctttttttgcctaatccctctggcagaacttccagtactctgttgaataaaagtggcaaaagtggacattcttgccttgttcctaattccagaggaaaagctttcagtcttttactattgagtgtgatattcattgtgggtttttcatatatggcttttattatgtttaggtaatgtccttctattcctattttttttttttaattttgtcaaatcgttttctgcatcaattaagatgatcgtgtgggtttttttctttttttgtgaaggtggtatatttattgatttttatatgttgaatcatccttgcattccaggaataaaagtcacttggtcatggtatataatccttttaatatgctactgaatgcagtttgctaatttttttgataatttttaaatatcagtgttcataagggatatttctctgtagtctttttttttttcttataatgtctttgtctgactttgatatcagggtaatgctggcctcatagaatgagttaggaagtgttatctcctcttcagtattctggaaaagtttgggaaggattggcattcattcttccttaaatgtttggtagaattcactggtgaagccatcaagctttgggcacaagggacttctggtttttgaccctggcaccggggccagtgggaagcaggttgaacaactaatttcggatttctacaacaataaggataattgagatttttttctttcttttcttttctttcttttcttttttctcccttccctcccctcccctcccctcccctccgcttctcttcccttctgtttttttttttttttctttaaatagagatagggtctcactatgttgcacaggctgtctcgatctcctgggctcaagtgattcacccgcctcggcctcccaaagtgctaggattacaggtatgagccaccatgagatttttgataatcgagatttttgttgttggtgacatgttttggggacacataagctattacactgtaaagttctgagcaggagtgaggaagcttccaatttcccccttctggcctgatttgctctaccaccctcactatgctctcagcctcctgctgggtgccaggcaagaaactttcttctcatgcttgccatgcagagtaacttcccactgtggcccccacatgggccacaggtgtgacatgtaagggaaaagtgagcagagtgaggaattagcaaagggcatgatcaaaacaagtcttgaacaagaatttgtttaaaatgctttcttgatgattggctggaaaatatggatatttcactatagatatacatgaaggggaatgagttccttccccacatcactttgggttgagttacaggttgtgaaaatcttgtctgagcctatgtcgaatcaaacttgtaagccttcatttgataaacatttattgatcatgtattatgtgtcaggcaccattgtggttactaaggacaaagtagtgaacaaaaaagacgcaaaatccctgccctctagtagttcatagtcgagtatgacgttccttgtcaccagctggggaggaagggtgggaccaccatcaccactttcactgggcatctaggaaactgggggaccaggtgggtgtggtgacttgctgaggtccctcagcaccatgtgacagtggctcacagccctgctgagccgggccctcctctcttcctcagataatcttcctgcagaccaggcctcgcctgccgcacacggctgccctgctgagcagctgcatggacggctacatctacgcctggtccctccatgagaatggaggcctgctggggaagttccctgtggacctagacaatggggatgttgtcgtgggtgccatggccactgataaaaatgactggatcctcatcacgggggattgtaaaggatacatcaaggtgaggaagaactggcaggaagattgaggggctggtgccagctaagtgttcggccatctctttgctcacatggcccttgcctagttcctactctgtctgggtactggttccatttgtgaaacaatgcagcgaggagtcctctcctgctctgctaagcccagtgacaggagcgggtcttggttcaaaaagcccctctgagaagccttccctggagaattccgtgctccatcactgtcttctccaactccctcatcccgaagtcatgtggctaatctaggatcagctgtctcaggagctgattgtgtgccttgtggcaagacatgaggcaggggtgtgctgtccttgagccggtcacacccttcctgcctgctaatccaggagtatggcctagaagatccctaaggccctttctggccctagtggtgaggtatctcagagatgtaagtaagaactgccccccacccccaccaaatgaagaggaatggtctgggaggagcccgcagagtgagttggggtctgggtcaaggggtgtgaggccactaacccacactttatgtctagatctgggacatcaaggattactgcgcattgattgataaacagccattccaatccagtggggccaaggttgtctctgaagcacacaacaagttccggttgttaattcctcagcaacttgggaccaacttcccacactacattcccttggaggataaagaggtaggaggattactggagagttgctcaggaaagtgcctttgagccccacaaatgagctaggaccataaactaactcatacccaagagaaatacacttactaaaagataagagcaaaaatattgatagaattagtattcgtggccagtcgtggtggcccacgcctgtaatcccagcactttgggaggctgaggcgggtggatcacgaggtcaggagtttgagaccagcctgaccaacatggtgaaaccctgtctctactaaaaatacaaaaattagccgagtgtggtggtgcactccttgtaatcccagctactcaggaggctgaggcaggagaatcgcttgaacctagaaggcagaggttgtagtgagctgagatcgcgccattgcattccagcctgggcgacagagcaagacttcgtttcaaaaaagaaaaagagttagtattcgtaataatgccacattagaaacaactcaaatgcccatcaccgtagactggaaaataaattacaaataaattacagtgtaatatctggcaccagaagtgaatttactcactacaaaatggagaactcttcaaacaatttaggcaaaagaagtcagacccagaagaacatatattagaaatgattgtttttgttgggggagtggagaggctggaaggaatcatgaaggggacttctggagaggttggcagtgctctgcttcattaacgggcctgatcatgcagttgtattcagtttctaaaaatttattcagtggtgggccgggcacggtggctcatgcctgtaatcccagcactttgggaggccaaggctggtggatcatctgaggtcaggagtttgagaccagcctggccaacctggtgaaaccctgtctactaaaaatacaaaaatcagctgggtgtggcggtgcacgcctgtaatcccagctacttgggaggctgaggcacaagaatcacttgaacccgggaggtggaggttgcagtgagcctagattgctccgttgccctccagcctgggcgacagcgtgtgactctgtctcaaaaaaaaaaattattcagtactacacttatatacgattttctatgtgtatatcatacatcaatgaaagttttaaaaagtcaggtaacgtaaaaaggcttacagcgaagagtctaagtcccattcctgttcccccaaacagttcatgctccctgaagtaaccacgtgtgttgatttttggttattcctctggtgtttacttatgcaaacacgatgtgtaaagttattttctactgaaggtatcatttcacttatactggtactcatcttgcttttcttgctgtatgatatatcttggagacctttgcatagcagcactatcccattttaaggtaaatttgtctttaaaaaaatcttacacaaaagtgaatagtgaatgttatttcacatatgtgaaggcatttctgtaggagatgttcttggaagtgggattgctaggtaaaagggttacatgcatttgcaattttgatagccttcttgcagtcttatgtgccttttgaatctctacatgagtatgttatggctagttcgttttagtatgaagagaatgtcattatattaaaatgtcttgggaactgattacccacagtgtcagtatgtgaagaatttataatgttgatacaatcatcatcataataatatttatttactgcttgcaatgttccagggatggtgatagtatattatatatgcattcattaatctccataatgacttgtgagggagatgatgtttttcagatgaggaagtaatgaaactgaagagctgagagactcgtctaagctccagtagcaaccagtgtagacctgagactaaacctaagtctgtctgactccagaatctgtgttcctgaccatctgctcttagttttataatgatatattttaaacaattgggattatattgtatgtaactggaatttcctataccatcaagtattcttttttctttaaaaattttattgtttcaaatagataaatcataattgtagacatttctgaggcacagtgtgctgttttgatctatgtacacatgtggaatgattaaatcaagccaattaacatatctaccacctcacttacaatttttatggtgagacatttaaaatttactcttagttatgttgaagtatgcaatatattactgactatagtcactctgctgtgcagaagatctcaaaactttttcctcctgtctgaccaaaacttggtacccctttgaccaataacttcccattctctctcccttattccccaccccaccctctaagcctctggtaaccatcattctcctttctacttctttttaaaaacctctttttggccgggctcagtggctcaagcctgtaatcccagtactttgggaggccgaggcgggcagatcacctgaggtcaggagttcaagaccagcctggcccacatggtgaaaccttgtccctactaaaaatacaaaattagccaggcatggtgatgcgtgcctgtaatcccagctactctggaggctgaggcaagaaatcacttgaacctgggaggcagaggttgcagtgagccgaggttgcgccactgcacttcagcctgggcaacaaagtgagactccgtctcaaaaaatcaatcaatcaaatcaaagcaaatcaaaaactttttttttttttttgtagagatgaggtctatgttgcccaggctggtcttgaactcctgggctcaaggaatcctcctgccttgacctcccaaagtgctgggattacaggtgtgagccaccgtgcccagccctttctacttctatgagtttgactttttataattccatatataaatacaatcatgcagtatttttctttcatgactggcttatttcacttaccataatgtcttccagattaatctatgttgtcccaaatgacaggattttttttctcttttaaggctgaatagtattccattatgtatatacaccacatttgcattatccattcatccactgatggccccttaggttgattctatatcttggctattgtgaaaagtgctgcaatgaacatgggagtgcaggtatttctttgacatattgatatgacatattgatctcttttggatatatacccagaagtggaattgctagatcatatagtagttctaattttagttttttgaggaaaccccatactatttctcgtagtggttgatatggtttggttgtgtccccacacaaatctcatcttgaattgtagctctcataatccccagctgtcgtgggagggacctggtgggaggtaattgaatcgtgggggtgggtttttcccaccattctaatgatagtgaataagtctcaagagatatgatggctttataaagggcagttcccctgctcatgctctcttgcctgctcccatgtaagacgtgcctttgctcctctttcacctctgccatgattgtgaggcctccccagccatgtggaactgtgagtccattaaacctttactttataaattacccagtctcggatatgtctttattagcagcatgagaacagaccaatacagtggttgtactgatttacattccctccaacattgtacaagggttttcttttttctgcctcctcaccaacacttgtttcttgtctttttgataacatctaatctaacagatgtaagatgatatctcattgtggtttaatttgtttttcctaatgattagtggtgctcagcattttttttcttgaacctgttggccatttgaatgtcttcttttgagaaatgtctctttggatgctttctccattttctcttctcttctcttttctttctttctttctttctttttttttttttttttttttttttgagatggcgttttgctcttgttgcccgggctggagtgcattgatccaatcttggctcactgcaacccccgcctcccgggttcaagcaattctcccgcctcagcctcctgagtagctgtgattacaggcacaggctaccacacccggctaattttgtattttcagtagagacgaggtgtcaccttgttggtcaggctggtcccgaactcctgacctcaagtgatctgcccgccttggcctcccaaagtgctgggattacaggcatgagccactgcacctggccactttgcctattttattttattttgagatggagttttgctcttattgcccagactggagtgcaatggcgcaattgcagctcaccacaacctccgcctcccaggttcaagcaattctcctgcctcagcctcccaagtaggtgggattacaggcatgcgccaccacgcccaactaattttgtagttttagtagagatggggtttctccatgttggtcaggctggtcttgaactcctgacctcaggtgatctgcccaccttgcctcccaaagtgctgggattacaagagtgagtgcacctggcccactttgctcattttctaattgggttattcgttttctggctattgagttgtttgagtttcttatttattgtggatgttactcccttatcagatgtatgatttacatatattttctgtcactctgtgggttatctctttactttgttcattgtttcctttctgtccaaaagctttgtatcttgtctaaaatcccatttgtctatttttgcttttatttatttttatttttatttttattttttatttttttgaaacggagtcttgctctgtcacccaggttggagtgcagtggtgcaatctcagctcactgcaacctctgcctcccaggttcaaggaagtctcctactccaacttcctgagtagctgggattataggcgtgtgccaccatgcctagctaatttttgtattttttggtagagacaggatttcaccatgttggccaggctggtgttgaactcttgacctcaggcaatccgcctgactcagcctcccaaagtgctgggattacacgtgtgagccaccgcgcctggcctatttttgcttttattacctgtgcttttggggtcatagctaaataaccattgctcagatcaatgtcatggagcctttcctctaggtattcttctagttgttttacagtctcagatcttatatttaagactttaatccattttgagttgattttttatactgtgtgagataaggatccaattttattcttctgtatgtggatccaattttcctagtacagtttattgaaaagactgtcttttccccattatgtattagtaacacctttgtcaaaaatcaattgactattagtgcatgggtttatttctgggttttctatcttgttacattagtcgatgtgtctatttttatgccagcaccatactgttttgattatattagctttataatatattttgaaatcagggactgtgatgtctttagctttgttctttttgctcaagattgttttggctagccagggtcttttatgattgcatatgaatttaaggattgttttatttctataagaaatgacattggaattttgatagggactgcattgaatctgtagattgctttgggtagtatgaatattttaataatattaattcttctaatttatcaacacaagatagctttccatttatttgtgttttcttaaacaatgttttagtttccagtgtacagatcttttaacttcttggttaaatttacccctaagtattttattttattttaaaatacctggctaattttgtatttaattttatattgtatttattttatttgtaataaaattaagcattttattttattttaaaatacctggctaattttgtatttttagtagagacagggtttctccatgttggtcaggctggtctcgaactccagacctcaggtgatccgactgcctcggcctcccaaagtgctggtattagaagcatgagccactgcccactgcacctagctgaaaaccacactttctgttgattaaataatatttcaccttatggagttacaaattttcattttatggggttataatcacttacttagcttgttatcttttgttggacattaatgtggtttctaacttttcattatcaaaaaataaaagaaaatggacaaaacctcagaaagacacaaactactaaagctgacttaataagaaatagaaaatctgaatatatagaaaatctgaatgtaacaagtaaggagattggattagtaataaaatttcccacaaagagaagtacacattcagatggtttcactggtaaattctaccaaatatttaaagatttttctttttttttgttgagacagagtctcactctattgcccaggctggagtacaatggtgtgatcttgactcactgcaacctctgcctccggggttcaagtgattctcctgcctcagcctcccgagtagctgggattacaggcatgcaccaccatgcctggctaatttttgtatttttagtagagacagggtttcaccacattggctaggctggtctcgaactcccaacctcgtgatccgcccaccatggcctcccaaagtgctgggattacaggcgtgagccaccacacctggctaaagaattaatgtcaattgctcacaaactcttccaaaagagttctctatgaggccagtattaccttgataccaaaaccagataaagatatcacaggaaaataaaactgtagaccaaatatttttatgaatatagatacaaaaatcttcaaaatactagcaaattgaaaccaacaacatatgaaaatgattatacaccatgaccaagtaagatttatcccaggaatgcaaagttggctaaatatccaaaatcaattaatgtaatacaccatattaactgaataaaaaacaaaagccatatgattatgccaatagatgcaaaaagagcatttaacaaaattgaacaccgttttctgattgaaacacccaataaactagaaatagaaactccttcaacctgataaaagccatttatgaaaactcacaggtagcataaaacttcatgttgaaatattaaatactttcctgtaaaatcagaaataaaacaagaatggttactcttgccaccccaatttaacattttattgggaggtcagttaggcaagaaaatgaaataaaaagtatctatattggggaggaagaagttaactatctctatctgcagatgacataatcttatatctagaaaatcctaaataatttattaaaaactattaaaactaataaattcaatagggttgcttgatataaatatacaaaaccaatatatttatatacactagcaataaacaatctgaaaatgaaaatttaaaaatttcacttataatcgcatcaaaaaaatacttaggaataaatttggaaaagtagtgcaaaacttgattcctgaaaattgcataacattatgggaagagatgaaagaatacccaaataaatggaaatacatctcatgttcattgattggaagactggatgttgttaatatagcatattccccaaattgatttaatgcaatttatatcaaaatcccagctgctttctcttctcttttctcttcccttttctttttcttttcttttcttccttccctccctcccttccttccttcctttctttttctttcttttccttcccttccttccttccttccctccttccctccttccctccctccctccctccttccttccttcgtttctctctttctttctttctctctccccaacttctttcttttttcttttccttccttcctttctttctctctttctttctctttctttctttctttctttctttctttctttctttctttctttctttctttctttctttctttctttctttctttcctctctctctctctctctctctctttccctccctccctgccttccttccttccatattctctctctctctctcctttttttttttgttttttgttttttgacagagtcttgctctgtcgcccaggctggagtgcagtggtgcaatctcagctcactgcaacctccgcctcccaggttcaaacgattttcctgcctcagcctcccaagtagctgggactacaggcatgtgccaccatgcctgactaatttttttgtatttttagtagagacggggtttcactgtattggtcacgctggtctcaaactcctgactttgtggtccgcctgccttggcctctcaaagtgcttggattgcaggcatgagccacctcgcctggcgggctggctttcttttcttccttccttccctccttttctccctcccttcctccctcctttctctctctgtctctctttttctttttttctcccttccttccttctctctctctcttttttttttcttctatttgacagagtcttgctctggtacccaggctggagtgcagtggcgccacctcggttcactgcaacctccgcctcccagattcaagcgattctcctgcctcagcctcccgagtagctgggattacaggtgcccgccaccatgcctggctaatttttgtattttcagtagagatggggttttgccatgttggccaagctggtctcgaactcctgacctcaggtgatccactcgcctcagcctcccaaagtgctacgattacaggcatgagccactgtgcctgcctgcctgcctgcctccctccctccctccctcccttccttccttccttccttccttccttccttccttccttccttccttccttccttccttgctttttggagatacaagggatatagatagtaagaaaaaaatcttgagaaagaacagagttgaaggactcacaattcccaagttcaaaactgaatatgaagttaagtaatcaagacaatgtgatactggcataaagaaagacatgtaaatcaatggaatagaatttagagttaaaaaataaattctcacattatgatcaattgatttttgacaagaatgctgagacaatcaaatggggagaaataatatattttttaaaacatgtcctgctgggacaatagggataactttatctgtattagaagaatgaagttagactcctacctcataacacatacaaaaattaactccaaatggatcatagacctaaatgtaagagccaaaattataagacttttagaagaaaataaatggaaaatacttgtgaccttagacagtgtgtcttagatatgacaccaaaaacaagctacaaaagaaaaaaacagataaattggactttgtcaaaattaaaaacttttgggctgcaaaggataccgtcaagaaagtgaaagggtaacctgaaagaaaatacttgcaaatcatatatctgataagggactagtatccagaatatataaagcactcttgcaacttgataaaaatgataaataaccaaattaagatacgggtaaaggatctaaataaacatttcttcaaagaagatgtacaaatggctaataagtatattaaatgatggtgaacatcattagctatcagggaaatgcatattaaaactataatgagatcccactttacacttgccaggataactatagataatagcaatggttggctgggatgtggacaaactgggactcttacacattgctggatagaatgtagaaagctggccaggtacggtggctcaggcctgtaatcccagcactttgggaggctgaggtgggcggattatgaggtcaggagtttgagaccagcctggccagcatggtgtaaccccgtctctactaaacatacaaaaattagcagggcatgatggcgggtgcctgtaatcccagctactcgggaggctgaggcaggagaatcgcttgaacctgggaggcggaggttgcagtgagcagagatcatgccattgcgttccagtctgggcaacaagagcaaaactccaaactctgtttaaaaaaaaaaaaagaaaaagaacatagaaagctgcagtcactttggaaaacagtctggcagttcctcaaaaattaagtgtagacttaccatattacccaacagttccactcccaagtgtatacccaagagaaatgaaaacatatgttcacataaaatcttgtacatgaatgtttatagtagcattatttataatacaaaagtggaaacaacccaaatgtcaacttccaaatggataaagtgtggtatggtgatacaatggaatgttatttaataataaaaaggaataaagtactgatgcatgcaacaacatggatgaaccttgaaaatactgtgctaagtgaaagaagccaaccacaaaataccatatattgtgtgattctgcttaaatgacatgtccagaatgtccatattaaagtagattagtggtttcctgaggctgggggagggagttggggaaattgcgtagtgactactgggtaaagagtttctttctggggtgatgaaatggtctaaaatagaatgtggtggtggttgcacagctctgaaaatactaaaaaccattgaatgagcactttaaattggtaaatttttatgtgaattatgattcaataaagttgtgtttagatattactaaaaatgatggtacaaatattctttttcacaaatgttttttgttgttgtttatagttgtttatttgtacatctagtaatttgtcccaaggaaagagtatgtaaaagaacataagtcactttaaggcctttaatgtatactacaaaattgcactctagaaggtttatacagttttgcatttcattagcctgttttttttatctttgacaacctaaagaatttattagtggtattcatctgaggatcctctaggtctatcagagtgtctttcttatagaaggcattcaataaataaatgtcctaagtgagcaaaacatttttggttgatttttaggtgcaaatggtttcttttgattttaattaagatgcctttgtttattagtgatgttgacatattttcttaatctattggctttgtataactttatgaattgtctcttcatgtcctttgcctacttttctattgtggtaactatcttttataaatgttgtataattatttaaaaatacattaggttgggcatggtagatcatgcctgtaatcccagctctctgggaggccaaggtgggcagattgcttgagcctaacagttcgagaccagcctgggcaacatagtgagaccccatctctaaaaaaaaaaaccaataaaaatatattaaaagattaactgattgtctatcatatggattacaaatatcccccccaatttgtcatttgcttgttaattttatttatgatgacttaaaaattacaatatattttttggtgttcaagtcagtttttgtccccattgtgatattttcctttgcctgtttatcactttcttagagaaaagataaatactgattcgttcttttgtaggtgttttatgatttcattgaaaataaaatcttcaacgcatctagtattcatttgggtgtaagataaaagataacaacgtaggtttctcttatagttcatcaggtatcctactactgtttattgagtcatgttttctgttaccactcttactatataccagttttacatacatttgggttggtttctgagctttctattgtcttccattgctttgtttaaaatttaaagtttattattctgactttccatacttgaatatggtcgaataagtcctcctttattaatcttgttttatttaaaaatggtcattttcactcattttccagttcagtagttttattctctcagtgtaatgtgatttatcaccccattgctcaccctattcatctcccaatacccagctgaaaaactttagaagactgaggctcttgccctggccccatcactttctagctatgtgggcttaggctagttattgaacatgtctgactctcacttttctcctctgtaagtcagtgagaattatatacttcttataaggttgtgaggttcaaatggaataatgtgtacagaggcacttggtaaacaatgtagtcatatgcaagtcatatgcaagtcatatgtagtcagcttggtgaattttgagaaagtaaatgcaagttctttttatggttttacctaaggggccagtgagggccagagaagtgccgggacctatgtaaggtcgcaagcaagttcatgtggaatgcatctagaactagaacgctagcctgtgtcccagggcccttccaactgggctctgctgcctgcagtcctgggtgccttctaattagcctgtgtagtggtcttggtaaaagtgtttctcctgtactgtcccctataggttgtggctggccataccatttccctggttccccccacgctcctgatgacctggaaaggccatttgaatagtgtggcagacatcctgtatgtggacaacttccagctggttatcagcgctggccaggaccgggacgtcaaggcttggaaactctccggtgatgccattggtatgggtcctgctgaagctcagccatgcccatggcccttcttgtctctgtccctgtctgaacataagctggtatgaactttgtactctgtggggagggactctcaggccacagcaactgccttcacttaaataatattacagtctgtccaattatccattcagcaaacggtccatccattcacccatccacccaatattattcacctatgtatatttttgcaaatcatatatctgataaagcatattcctttctcttttaaaaaataaacttaattgttgcattgtatataaagaaaaacatacaaaccagaagggttcagcttggtgaattttgagaaagtaaatacatacccatatagccaccgttcatgtcaagaaataattagggccaggcgcggtggctcactactgtaatcccaacacttttttgtccccttttcctcctgtgctgtcttcctatgtgtttgtttgtttgttttagtgacctgtctctactaaaaatacaaaaattagccaggcatggtggtgcatgcctgtaatcccagctacttgagaggctgaggcaggagaatcgtttgaacctgggaggcagaggttgcagtgagctgagatcatgtcactgcactccagcctgggcaacagagtgagactctgtctaaaaaaaaaataataataaaaataaagtgacttatgtgccactattacagtattacagcattctgtatttttctatgtgtttacatttatcagaaagctttgtattttcatatgctttcatgttcctgcctagcatccttttgtttcaacttgaaggggtccctttagcatttctttaaaggcaggtctaatggtgatgaactcctcttgtttttatttatctgggaaaatttttatttttccttcatttttaaaggacagctttcctggatatagtatttttggatgagagtttttgttctttttataatgtgtctccttgtggatttctttgactttatcctagttggaatcccttgagcttcttgaatataggtttcttttcctttttaagatttgaaacattttcagccattatttattcagataagctttttgtccctttctctctctctgtctctctctcctccttctagtactaccataatgcatatattgtccatttgacgatgtctcataaatcccttaagttttctttactctttaaaattcttttttcttttttgcttctctgactggatatcttcaagtctgctgatttttccttctgcttgatcaagcctgctgtagatgacttttgaattcaattattttactcttcatcttcagctctagaatttctgttatttttattattattattattattttttgagacagggtcttgctctgccacccagggttgagtgcagtggcacgaattcagctcactgaagccttgacctcccagcctcaagtgatcttcccacagcctcctgagtagctgggactacaggtgcatgccatcatgcctggctaattttttgtattttttgtagagacagagtttcaccatgttgcccaggctggccttgaattcttgagctcaagtgatcgcccacctaagcttcccaaagtgttgggattataggtgtgggccaccatggctggcctctgtttggttcttttctatattttctgtgtcttcactaatattctcagtttgttcatgtattgtttccctgagcttgttgagcatttttattacggttacttagaattctttgtcaaataattaatatacctcaatttctttagcggcagtttctggagatttattttgttcctttgggccatgctttcctattttttttgtgtgccttataactttatattgggatccatgcatttgtaaaatcagccacctctcccagtctttatatactggcttcattcagggaaaattctgcaccaatcagcttggctaaagattctgggtgcctccccaatcttttttgtggatactttcaccagacttacgcatgtaaattcgcaattacaggaatctacaggtttatttttttcaggagtccattatctcttgctctctctggtgtctatttgcagtactgcaagttctctagagcggctacaagcttcccccaggcctctagaatatgctgggtccttcaatagtctgagagaggcaagacagaaaccagtttcttgggtacccctcaaaggctaacattggatatgtatgctccaaatctgcctcctcaaggagaagctggaagttgggttgttttctctactcattccacagagcggcaggagggactctgatagtgtgtgctagtctaaattgtcacctttgttcttagtagcccagtctggtgcctcttcctgtcagtgcttagattcaggcaagacagaaactggttaatcatgcagccctctgaaaagtctgcatgttggatgtacatctcagtctttccctcccagggagaagctggaagctggtggttccttcccaatctgcttcactgagccaggaggagggattacaagtgagcactatgaattttcctactggcttcagtgcagctggttttttgttttttgtttttttggtttttgtttgtttgttttttcattcatctgggatgaatggtcctggtttctggtccatgtactgttgttcagtcagtgtctccatagggagaaggaagttctggatcttcctattctaccatcttgctgatgtcacccatttttttgtatctttcaaagacgtctttgactatcccctaaatataatatctagtgttatcttttagaagcttgttttaaaaatcagatttctgaagtataatttacatccaataaaagcaccttttaaaagtatatagttctgtgaggtttcatgaatgcatacaattgtgtaattggtatcacaatcaagacatagacattaccccaaaaagtgacctcatgtctcctcatagtaaactctatttccttctcctaacccctggcagccattgatctgtttgtctctatagttttgccttttccagattatcataaatggaaacatacacatgtagctgagtgaaagtctaactttcacttagcataatcaatttgagattcatctttgttgttgaacgtatcagtagtttgttctttttattgctgagtattattccactgtatggctctgtcatagtttgttaatccattcaccaattataggacatttgagtcattgtcagttttggatgattatgaatgaagccgctttaaacattgttttcatttctgttgggtaagtatttagaagcagaatggctgggttgtatggtaagtgtattgaaactttatgaaaaatgaccaaactgttttgcatttctacctttgtgtcttcatcaacatttggtgtttgatctgttattattttaaattttaataatctatgattgtagcatgagatttcaatattctctcaatttataaaacaactatacagaaaatcattaatgatatagaatacttgaataacactatcaaacaattttacttaattaacatttatagatcattcataaacaaacattatttttaagtgcacacagaacattaattaaaccgaccatattctggtaacaaaacacatctcactaatctcaaaaggatttatgccatacaaagtatgttctctgatcccaatgaaactgaattataaatcaaaaacagaaatatctttgaaatatccctaaatatttggaagctaaatgacacatttctaaataacccatgggccaaaaaaagaaatccagagggaaattagaaaatattttgaactgaatgaaaatgaaaatgtaacatttcaaaatttatgagatgccacaaaaaacagtagtaacggggaaatttgtagcactaaatgcctatattagaaggaaaaaagttcaaatctccagcctcaacttccacattaagaaactagaaagaggtctggtgcggtggctcacgcctttgggaggcaggtgggaggatcatttgaacccaggggttcaagaccagcctaggcaacataacaagaccccatctcaattaaaaaaaaaaaaaaagaaaaaagaaactagaaagaaagagcaaattgagcccaaagtaaatagaagagaaataataaagattagaatggaaatcgatgaaacagggaagtaaaaaataataaggaaaatcaatgaacccaaaagctggttctttgaaaagatagttaaatcgataaacctccagctagactgggcaggaaaaagagagagaatacaccaattaccaatatcaggaatgagtgagatgacatcatttctgattctacagatattaaaaggataacaatgaaatactataaacaactttatacaataaatttggcaacttatatgaaataaactccttgaaagaaacaaactactaaatcttacacaagaagaaacagataacccgaatatccttatatcaaagaaattaaatttgtagtttaaaactctccttacaaagatacctccaggcctaaatggcttccatggtgaattttacccaaatatttgaaggggaaataatataaattctacagaaactcttccagaaagttgaaaagggtacaatacttcccaactcatgaggcaacttggtaccaaaatctgacaaagacgttataagaagaaagtgaaaaagaaagaaagaaagaaagaaagaaagaaagaaagaaagaaagaaagaaagaaagaaaagaaaggaaaagaaagcaaactatcaattaatatccctcataagcataaatacaaaatatcttaacaaaattttgcaaataaaatccagcaatgatcacatagggtttaccccagatatacaaggttggtttaatatttgaaaatcagtgtaatttattatattaataaagtgaaaaactatgtgattatcttgatacaataaaatcatttgacaaaattcaacatccatttctgataaaaaacatttagcaaaatagaaaaaactttctcaacctgaggaagtgcatctgtgaaaaaacctaaaactagcttcacacctaatggtgaaaggctgagtactttcccctgaccaggaataagacatgtcacttcgattcaaaattatactagaagagtagagggcaattacagaaggaaaaaaaaaggcattcagattggaaaggaagaaataaaactgtttttatttgtagttgactaattgtctatgtagaaaatccagtggattttactaaaaagagttagtaaggagtttaacaaggttgcaggatacaagatcaatacaaaaaatcaattgtatttctatatactagcaatgaacagccagaaattgaagtaaaagatacatttacgaaaacataaaacataaataccaagatatgtaagtacacagaaaaatactacaaaacattgctgagacaaagtatagaagatttactgttaatgggtagaagactctctgattaagaataaaattatctccaaattgatttataggttaactgaaataccaatcaatatcccagaagaatttttgtagaaattgacacactgattctaaaatttatttaggccagtcaaaatagctttggcaaaggaaactaagatgaagggctaacattgcctgatttcaagacttattgtgaagccatggtaatcaagacagtgtggtaatggcatagagacagacagacagatcaatggaatggcacagaaagtccagagatatatccatacatatatggacatctgtttctgacaaaagtgcaaaggcaattcagtggagaaaagacagtcttaaagcaatgaacttggatccacacctcacaccacatacaaaaagcaattcaaaatgggccatgcatgatggttcacacccgtaatccaagcactttgggaggatgaggtgggaagatcacttgaggccagaagttcgagaccagcctggccaacatggcaaaaccccatctctgctaaacatacaaaaaattagccaggcatggcggtgcctgcctgcaatcccagctactcgggaggctgaggcacaagaatcgcttgaacctgggaggcggaggctgcagtgagccaagatcgcaccactgcactgcagcctgggcaacagagcaagactctgtctcaaaaacaaacaaaacaacaaaacaacaacaacaacaacaaaaatggaacatagaactaaaggcaaaagttaaaactaaaacttccagaagaaatcgtaggagaaaacctttgtgaccttggtttaggcaaagattgtttgcatgcaacaccgatagagcatgattcataaaatatcaagttaataacagtttatcaaacttaaaaacttctgctcttcaaaagacactgttaagagaacaaagataaaccacagactgggagaagatatttgcaaatcctatatctgataaagctcctatttagaatatataaactctcagaactcaacaaggaaacaagtaatacaataaaaacattagaaagaggtttgaatagacacttcaccaaatttgaagagacttcactgtaagaattaaagaggaaacacgaaggacagctcaacagtcaacagggacaggtttattttaaataaacctgagaggggcggctggctgagttaggttagagccacactctcttacagactaagagtttttaaggattcagggtgggagaatttatcagaggcttggactgcttctgtgtctctttgttgtgcttatctgggagggagagttgtgtgtctgttcccatacatctttctgcagctgcaggcaaatcccccgggttgcttttagcttccctatcttagtgcacctgaagggaaaggaatgtgcttcttaagacccactgttttactggagcccattgtatgagggtgaagtttagcagttacccaagagacctccccctccctctgtgcccaagctgtcctattgtattttactgtctgctctttttggctgcttgtagttagaagagacgtgatttccttgaaatgcatgaggctagaaagggagctggaacttaaagtggcagtgtttgtccgagatgacggtgctcctgctctgtcattcaccaaaggaaatatatagaagcatggaaaacaatgcgcaatatttattcattagaagagaaatactaattaaaaccgctgtaagataccatttatcttattagaatggctaaaggagctgaaactctcctgcacggctaatgggaatataaaatggttcaaccactttggaaagcattttggcagtttcttaaaaagttaaatgtgcccctatgatatgaatcagctgttccacttctatgaaagcatatgcccgggtaaagactacatacataaatgttcacagcagtatttttttgtgacagcctcaaactagaaacgattcaaatgtccatcaatagttgagttgataaactatggtttatggaatatcactcagcaataaaacagaatgaagaattgatacgttatacaacgtggttggatctcaaaataattatgcttagtgagagaagccagacgaaaacctgtacatattgtatgattctatttattttttcccaaccatttacacctgcatctatttatataaaattttaggaaatgcaaacaaatgtgtagtgtgacagcagataactggttgtttgaggatagggggctgatgagggttggaagggtgggagctcaaagaagcaggaagaaacttttgcaggtgatggatatgtacacattaaatagaaactggttattgcatgtcaattatacttcaataaaactgttaaaaatagtcatcctactaggtttatagtggtatcttactgtgattttaatttgcattcctctagtgactaatgatgttgaaatattttcttgcacttattagttatccatatatcttctttgatgcaatgcctgttcagatcttttgccattaaaaaaaactgtgttgttttcttattgagttttgagaatgctttattctggatacaagttcttgatcagatatgaggttttgaaaatatttttctccactactgtggcttgtgtttacattctcttcatagtgcattttgaagatcagtggccaggcatggtggctcacgcctgtaataccagcactttggggggccaaagtgggtggattgcttgagctcaggagtttgagaccagcctgggcaacatagtgagactcttgtttctacaaaaaaaaatattaaaaattagccagttgtggtggtgcatgtctatagtcccagctattcaggaggctgaggcaggaggattgcttgagcccgggaggttgaagatgcagtaatctgtgattgagccactgcactacagcctgggcaacagaataagaccctgtctcaaaaaaagaaaaaaaaaatcagaagttttaaattttggcattgtatgcaagaaatttttgcctaacccaaggtcacaaatgtttccactatattttcttctataagttttatagttttcactcttactttttggtctataatcattttgagttaatttttgtaatgttgtgaaatatgagacaaaatttaaattttgcatggagatagccacttgttccagcactatttttatcctttctcctttgagttccttttgtacttttgtcaaaaatcaatttgttattggccactcatacatctactcctgtgaagtgtctctttgagtattttgttgtttttaagaaatttggttgcttgtctttgtattcttgatttgtagaaattctttgtgtcctggatatgagacctttaacaggtatccacattgtgagtacttttatcagtgtatcacttgcccgttcattttcctgatggcatcttttgatgagcagaaatttttaattttgctgaagtccaacttaccaagttaaagaacatgttgggtactttaaaattgtggtaaaatatatagcataaaacttaccatcttaaccatttttaagtctacagttcagtagtgttaagtatattcacattgttgtgccatagatctctggaactttttcattttgcaaatctgaagctttatagtcattgaacatactcctccatttcccgttacctccagcccctggtaaccatcattcaactttctgtttctacgaatttaactactttagttactcacctaagtagaataatacaatagtcatctttttgtgactggcatctttcacttagcataatgccctcaatatttattaatattgtaacatgtgacaagatatcctttcttttttaacattgaataatatttcattgtatatatatgccacattttctttatccattcatctgttaatggacactttagttgactccacctcttggctgttgtgaattgtgcttctgtgaacatgggtgtgcaagtatctatctctttgagaccctgctttcaattcttttggataaatacccagtagtgggattgctggatcatatggtagttctacttttcattttttgaggaacctccatactgttttccatagcacatgtaccattttataatcccaccaaacatgcacaagggttccaatttctctgcaaccttgccagcacttgttattttgtttttgttttttttgtttgaaacagccattctaatgggatgatgttgtggttttgatctgcagttctctaatgattcatgaggttggcaatcatcttttcatgtgcttgttggccattgtatatcatctttggagaaataaatatctattcaagtcttttgcccattttcaaattgggtgttgttgtttttaagttgtaggagttctttatatattatggatattaacctcttatcagggatatgattttcagatactttctcccattctgtaggcttcgttttcattgggttgattgttgattgtggtttttgtttgtttgtttgttttgaaatggaggtttgctcttgttacccaggctggagtgcaatggtgccatctcagctcactgcaaccttcacctcctgggttcaagcgatcctcctgcctcagcctcccgagtagctgggcttacaggcccaccacacctctctaatttttgtatttttagtagagacagagtttcatcactttggccaggctggtctcgaactgcaggcctcaggtgatacacctgcctcagcctcccaaagtgctgggatcttagatgtgagccaccacacccagcatgattacgttttttgatacacagaggttttcaagtttaatgtctatttttgctttcattgcctgtttttttagtgtcatatccaagaaataatggcctaatccaatgttatgaagcttttcctccatattttttctaggagtttttacagttttgggtattatctttaggtatttaattcattttgagttcatttttgtatatggcataaaataacagtccagttttactcttttgcatgtggcaattcggttttcccaaaaccatttgttgtagagactatctttcccaattgagtggtcttggcacttttgttgaatatcatttggctatatatgtgaggctttatttttggatactctcttctattccattggtttatatgtctgtttttatgcctgtaccacactgtcttgattcctgtagctttgtaatatgttttgaaatcagcaagtagatgtttttgttctctaataaatttttgcttacattaaaattacaaagatattctcttagatttccctctagaaactagagattttggcttttaatttagctctatgatccatcttcaattaattgttgtgtagagaggatgttttctctatttctaattagccaagagagttaaaaaaaatcataaataggtgttgaattctgtcaaacgctttttctgcttctactgtgataatcatatagcttttgtcctttatcctgttgatgtggtaaattacattttttgaattttgaaaattcaaccttgcattcctggagtaaaccccacttagtcaagatgtattattcttttaatatattgttgaattctattttactcttaatggaactttattgtattatggccaggaaccattgagtgcccaaaaccttcttggtcctggacatctatcctccccatgagtagagtggccaatgggaattcaaaataccattttactttggttctcttggttttacctaaaaaaatgcagcatttttctggtaagtggagatagagctgtatgattttgcttaaggcaggcccctccctccccctaaagccaaacccagatcttatcctagctggccattagagacaagaacacaagtgaaaaacagaatggctcctccaagtgcatttgtaacaagtgatccctgctgggctcagtggctcatgcctgtaatcacagcactttgacagaccaaggtgggaggattacttgaacccaggagtttgaggccagcatgggcaacaatgtgagaccctgtctctacaaaaaattaaaaacttagctgggcatggaagtgtgcacctgtagtcccagtgactcaggaggctgaggcaggaggatcgctagagcccaggtgtttgaggttgcagtgagttaagactgcgctgctgtactccagcttggggaacagaacaataccctgtctcaaaaaataaaaataaaataaaataaaacaaattatctaaaaaacatgccctctcagtattcgagagtcctgtttggattagtaaatgttctattcttgaagaaaccccaagaagggcttgagaagggggctgggagccttccccacctccaaacagcaagcatatatcttctgttccacgtcctgagcgagggtataggtggcctccaacccagttggaataaaggtcctgcctcacatgtgcaaatgctgcctgcccatgtaagggagggaaaaagctgtttctctattttttgttaaaaacgaccctttcagcccatctctgttcttatatttgtgtgcctcttttaaacaatgtataattgagtcttatttttttcatcctgtctgacaatctttaccttttaattgggtatttagtccatttaaatatcaacaattatgtagttgggttgaagtcaatcatcttgctatttattttttctgtttatcctatccttggtttcttttttcttccttttcttatttcttttggattaatcaaatatttaaaaaattgttgttttatgtcctctgctctttaaatggtatcttttgtattattcttttagtgattaccttagagattatatgtattcttgacctagtgctgcttcctgtacaagaatcttacatccctcccatgtttatgttattattatatattttatttctacatatgttatgtcttcctataagacattgtcattattatttctttcagcagtcaatttccttttatggttactcacatatttaccatttctggtgctcttcattcttgagttctaggattctgtctgcagttgttttcctttattctgaagaaattcctatttcttatagtgttatctgccactaataaattctcagattaataattttcagatcaaattttctgatcaaattttcagatcaatagtttattgatctgaaaatatctttattttgccgtaaaatttaagactattttactgggtatagaattctcagctggcagtttcttttctttcagcatttaaaaaaatcattcagtggtcttctggtgttgatattttctgttgaaaagtcagttgcaagttgcttctttgaaggtaatttgtctttttttcccctggctgcttttggttttcagcagtttgactatgatgtgcgtaagtgtggttttgtttgtatttattctgcttggagttcactgatcttttaaatctagaggttgatgtctttcatcagttttgaaaagcattcagatattatctcttcactattacttctgcattattctctctctcctctcattgtgggggtactaactatatgtatactagactatttgactttgtctcataggtctcatgccctattcttttttttttttttcattttttttcaatctctgaattccagattatttttttgctgacctgccttccagttcacgaatcctatcctcttctgtatgcagcttgctattaaatctattgaattagttcttaattttagatgtatttttttagttttagaatgtccatttgattcttttctatagattgcaattcttttccaccattttattcaattttccttaattttatttaacattatttgtaacagttatttaaagttttaatctgctaactccaatgtgaatcttctggagggcccacttctaatgcctatttcttctcttgattattggttatattggccttttcacatgtcatatatacaaaataaaattaaaaaaaaaaaacccaaaacttttctgggcttgtataaatggattgtaaagactttagttgatattatttcccccagagcatttgctctttcctctgtatagggctgagcatctccatccagttggggattgaactgggttggggctggatagcagctttaggaggactcagtttgcctctgtgttcagttgtctcaaggttgaaatctgtgtctgtttcaggctcctccttcagtgggactctgtctcccaatgatctcattcggcttttctataccagcacctacaaccccagcctccctggtgctcggcaaatgtcctaacaagaaaaacagctgtgcattcaggcgagacttaattaatcatgccagccacagtggatgtcagaagctctgctggtttctctctctctaagccaagtctgattctcattcagcccgtgtgtagactcaggagtgcccccgagacaagaaagcagctcccactcccagctcttcttggaaagacttgtccctttctgtcatcttagttcacctggccctctttgcttctactgctttccagtgatttttttttttcttaaatgattttttacctgttttatttttcttaactttaaaaatcctgcagcaggagaatggcctactactcactattctctgcccaggagcaggacttaattctgttttcagtacctactttttactccagccccattccttcccccaccaccccaaatctcatatctgatgggtgtctgaccgttttatgccattgccattttacacacaagctacctgaagcccaactgaggatcattcagtcactgccatagtactctccccatctcagttcacatgtggggcaggatgctttaggcctgagctccgagtgtgtcctagggcttctgtctggctcatccacacgtttgttgagtactcagtgtcgtgcctggtgtatggtgggcactcaacatttgagtgagtgtgggggctgaggataggggctgctagctgacccttgaagggagaggataaggggcagagggcatggaggagggggtatgccagttgtggttctgagcagtctggtcaaatcacaggaacgtttggcctgagtgtgtggaaaagactacaggatgcctgtgatggtcctcgtgaaaacagagcaagcttagaggaagatggtgactccactggcaccacccagaaggtcttacatctggagctgcagtgagtgagcacagcctgcttgatcttctctggcctgaggagggagaggctgtgagtcttcccaggtcctgggaagcctctacctgggttgggtagagctaggcatgggtggggaggaccctcagaaggccagaggcttgagggttgcaggcagctctactccacagtggcagctatggctggagagcccaggccctattttagcccagctcagctgaaaggttgagcagtgaaaggggaaaatacaaaaacccaagtgcttggatggggccctgtcccccagccaggcccagatttgctagagctggcttccctgcagagatcattgctgcatggccagaggtccctggcagaggagtgctcaggcccaggcccaagtccctgatcctgagaggacatttgtgttatttccctgatttgcagggaggagcaggctgctggctacttggtcctccccctgcaggttcatctcctacccactccatccactgcatctttattcctgaccaagtctccagtaattctggttcattcaagaaaatgtgtattgagatcctactgactgccagaccttgtgctaggttctagaaatacaagacatccagacacagtcctgcctcagagaactcacagtttactcagggaggtggacatgcaaactcatggctgcaattttatgtgataagtaatgagagtattaggaacagggatggctcagaggacaatctacatgattgagtggatcaagtaaggaaggcttcgtaggagaggtgattttggagttgggttttgacatttaagtaggagtctgtcaggcatccacagaatctttgtgactcctatgcttccatcaaggcatacatcttgacagtacagtggagggacatcaaacaaggcaaaggcagggtttccctggggcagggggcagacatgtttaaatagtccacaaggggaggtccagataaagccagatcgggtgtcaggtctgcatggtggagaggacagagtggtgggagagtggcaggactgctgggccagctggatccaggctttgcaaatgttaattccatacttactcagtgatggactctggggagtctggcctgagggagggatggaagattggaaaggatcaggccaggaaggggagaggctttcagggtttctgggagggtcaccctgctttgcagtggggggacatcttgtgaaggaaagcccccacactagggagcagcgggatctggctgaggccctgatataccagcggcgagagcaggcggcgctgatggctctcctgcatgggaaggcagataaggaggcagacacttgggccaagctgcagaagatggccctgatgtccccgtgggccggagagcgccccctggaagacattgaggacagctggaacaagtgggagtccagggacaagcaggtgaggctgggaggggagcacagggaggagtgcagggacccccaactcgcagccttcattcttgggcgtggctcctgcaggtgagcaaagtcttgggagcggcgtataagcccaaggaacgcttgcagaataccaggttcctgtccaccagggtgccatatggctggatgaagcatcaggtaaggtgggatggggcagctccccaagaggctgggtcaggggccaggggatcccatgtccaccagcagccacccttgtgcccacacagcccttcagtgagggtggacaggagcctttgtcctttaacaggattctgggccatggacaggtctgggatgagactaatgtggccagtttgtttgccaaggccctggctgaggtcagtggtgcagcttttgtccttgaggacaagcctcaagggcctgtgggacaaggtctccttgggcaggactcctgtctatagcctccaagcatttcctatggtctgtggctgtctatttgctggttagcatatttcccacctgtgtccccactactttggtgctcaaacagcagactagggcatcatgccaggcccatagtaagagacagggtaaacggagtggctctccatcagggacagaaaggagcaggggatgttcgaaagagcagatttgagctccagatttgagatcccagcctccccgtccttgtctgccaggggaatattgtgggagctccctcctccctgtggtccccttaagaataaatgagataacaccgaaggccatgcccctgcagggcccccctgtctcgggctggggagaggctggtgtgagatggattgctccaaggagctctttgcacctgggcctcacccagggtccagctcgaggcctcattctcagaagcgggcagtctgctcgccagctcacagagttgccacaagcgccgtaactgggtggagagcagggctgggcacctggcctggtgcagggtggatgcatgggcccgcaggccacggtggttagtggtagccacagtcctctggacacacgccttcttggcatgggaagacctcagggcgcctccttcctgtgagtctactcttgatcctgggtgtccccggctccaactggtgccccattcccgctccccactctgttccctgcagatctcgcctcaggtctaccaaagcctgcacttcagtgatctgatgccgactcagcagcctgacttcctgaccagcaggggcccagaccagcaagaccagcacatccgcctggtggcccaccatgtccagaaggacctggtgcccagcagggagcaggctgtgctggataccacggacagcacgcctgcggccgcctcctccccatcttccttgttatctgtcactgcctcagcctccaggctgctggactccagcttgcccaccttcctgacgccccagttctccttcttgctgcggccccagtcagcctccacagcccattccaccccctcggtcccatccccggtgtccaagtccaccctgcaggggtcagtgacccccaagcacattgtctcctccttcgagcggcccccaaggcctctgaaggccaccttcatgtcctctgtgaaggggagctcccatgtcaggttctgaggtgctccgctgtcttctctagtcctccagcagggcaaccaggcccatggcggtcctgcatgttctcggcttattccctaccagacccagaggatgtggctcttcccccggccaccccactgggcctctctggggaagttcacctgtctcctaatcttgtcttctctctggccccgcacagagccctggggcagaaaataaatgttctcagctgtgggcatccacaggtgatgaggttgggctgtgtgttccttgcccccttaggtccttccttttctgagaccagtcacatcccctggccctggcagaggcagagaggagagtccaaggacacctgggcatggctggttggcttggaaacttggttcagcctcatggcaagagtgaggaccggcagccatctggtgagggtcatggctgtttgtcttctgcccctgctgtctgtcagtcttccctcatcatcaaacactccaccccaagcaccttgttctgtcccgtgtgcagagagggctggaagcatggtgggcagcacccctcctggctctgccgctgtcaggctatggagtcccatgtgtccttcccctctggcccagaggcacctttccagacctctgctgggccatcagccctcttggcagctggagatcccattctggggcatgtggggccctctggacatatcacctgcagcctgaagggagctggggcagcccactgctactgagcaaggaggaggtgggctataggctgggggttcttgggggatctctctgtctcagtgtcctcactgaccctcctgtgcagtccgaggctcagccctgaggggcgtatgtgtcgtttctcatctctgtgtttctccttccatttccctttacacttcacaggggtggaagcacgggctccccaccaccactctgctgggaggttgggaggttttttttttttgagacagagtcttgctctgtcacccaggctggagtgcagtggcacgatctcggctcactgcaacctccgcctcccaggttcaggtgattctcctgtctcagcctctcgagtagctgggattacaggcatgtgccgccatgcccggctaatttttgtatttttagtagagacagagttttgtcatgttggccaggctgggctcgaactcctgacccaaaatgttccacccgcctcagacccccaaagtgctgggattacaggcgtgagccactgcgcccggtctgctgggagtttctgcgtcacctgtgcctccttcctggggtcactgcatcctctcctgtatgaagaaattatgatctaagccctcccagcttggttcttgcattaaggagtcaggggcacgcaggagccaggcattattgaggccaaagtccatctgcagtctgtatcccaataccatctctgtatccgtttcctagtgctgctggaaaaaaagtaccacacttgatgtcttaaaacaacagaaactaattgtctcagctctggaggctggaggtcaaggtgtcagcttggaagaggctgcagcttacgtgtcagtagcttcccagtaaacccacccagcagcccttgttgattttcactttcacaacaaacacctattaagtgccttctaatctagaaaactcttccttatggtggagctgaaaaaggcgtccgtctggggctgaggagaggctgctgtctgggccacagaggatcatgggatgtgtccccaggaggaggtgctggggatcagacacctttgtggtcggggttgggggcacaggtgatggggccctgcccaggccacgcggaccccaagcagtgcctcccctgaccttcccctcataccacctcccctgggaagtggcttctcattttagaaccctgcctttgtgtcccagggcttctggatgcccctggaagttggtaacagagcaccccacacaggggccttcaaacaatagacattaattttttcacagttctggaggccagaagcccaaaatcaaggtgtcaacagggcaccttgaacctggtaggggaggacccttccttgcctcttccagcttctggtgtttgctggtaatccttgcttggtgttccttggcttagagatgcatttcccgccccgctcctcactctgcctccattgtcacacgggcatcttcttcatgggtctccatgatgcctcttttttttcttttcctttcttttcttttcttttctttcttccttccttccttccttcttttctcctccttcttccatctcctcctcctccttttttctacttctatcttctttcttcttctatcttctttcgtcttctccttctccttcttttcctcctcctcctcctcttcttctccttcctccttcctccttcctcctttctccttctccttctccttctccttcttcttctccttcttcttctccttcttctcattcctcctcttcttctccttctccttagagacaggatctcactctgtcaccaaggctggagtgcagtggtgtgatgatcatagctcactgcagcctcaactccccaggctccagcgaacctccccgcctcagcttcccaggtagctgagaccacaggtgcacaccactacgcctggctacttttcagaattttttgtagaggccgagtgcagtggctcatgcctgtaatcccagcactttgggaggccgacacgggaggattgcttgaggtcaggagcttgagaccagcctggccaacgtggcgaaaccccgtctctactaaaaatacaaaaattagccaggcatggtagtgcatgcctgtaatcccagccacttgggaggctgagacaggagaattgcttgaatctgggaggtggaggttgcagtgagctgaaattgtgccactgcactccagcctgggcaacagagcaaggctgtgtctcagaaaaataaaaaaataaaaaataaaacttttgtagatacaagatcttgctgtgttgcccaggctggtctcaaactcctgggctcaagggatcctcctgcctcagactcccaaagtgctgggattataggcatgagccactgcacccgaccacagtgtcttctcataaggacaccaggcatacaggattaagggcccgccctactccagtataacttcatcttaactgatgacttctgcaacaaccctatttccaaatcaggccacattctggggtactgggcctgagggcttcaacgtatcctttggaggacacaggtcaacccataacagcccccgaggtcggggagcagaagagagtgtggctgcactgaagatttttcccagtttctttttcttttttttctttttttgagatagagcctcactctgtcgcccaggctggagtgcagtggcgtgatcttggctcacagcaacctccgcctcctgggttcaagcgattctgcttcagcctcccaagtaactgggattacaggcatgcggcaccatgcccggctaattttgtatttttagtagatatggggtttcaccatgttggccaggctggtcttgaacccctgacctctggtgatccacccacctcatcctcccaaagcgctgggattacaggtatgagccaccaggccctgccgattttcccagtttctagagctttcagctttgtagctgacgccctcttcttaaatcccagctgttctcccagcaaatttcagctagagtccctcaaaccaatgatgaactctaagttacctgccacctccccactgacccagggaccggtgtttctgagccaggcacggaacaggggtggctgtgctcgattcctctcttccaccctcactggatttccctcgttgacttatccgagaaggagtgggcttgaactctctttcccttctgcaaaaggatggaatttccagcattccctgtttctcaaagttgaaggaagtgagagacaacctttattagacacgttccaagcatcaggtcctgaaccaggtactgaaactgtatttaatcctcacatcattccacgaggtgggtgctgatatgacctcattttgcagagaaagagaggttcagagaggtgaaattgcttgcccacgatcacgccaggaagtgggggagtcagcgtttgaacgctgccaggctcagctgctctgagtgcaactgctgggctgtcccagataactcaacccccacaaagctatgtccattggctttggggcctgtcctgggctctggccttgctcccttgggaggaaggacccctggtccctcctgactgtgctgtcctggtgtctgtccagtttagcccagcctgcgaagggcttggtgactttggccaccacttgaggtgggaggggagtgtccctgccaaaggctcattggctgatgccagaaatcagcttcatttacccaaggtacccagctgatgcacccagtcctggttgtcagcacctcagggtcctgcctctccagcgctgagccctggtgtagtctgtacaggtttggaaagtgagttgtgggcccgggcaggggcgcagctgggattggaaaggaaaggcaggacaggcaaggcctggggcagctgtgggctctcttgagcgggataagcgagatgctcctcaccagtccagactctatttccaaaaccctctcctgcccatcagctcacttgagctggacaacagttttcttaggcatttgccccattttacagcagggcaaactgaggctcagcgaggagtaaggtttcacagctagaaactggtagagctaggattcgaacccagggttttctgagctaaagccctcgatccttccattacatcctgctctgcgcagcatctcaggtggagaactcaggaagtggggaggtgtgtggataagctggtgaaaaagcccaaggccaggcctagggctggtccctcctctgcccagaggaaggacacgggggaaggacactggggctggggagcagggaagatgggggtggtagcaaccaggcttcgggggattttcttagaggcttctgcataaccctgacctggagggtggttcagggtttcctttagagacccaagatcctgacatggggacacctggctggacaccatggaccaggacaggccaacctgtccccaatcccctgactctgggactcttcaaacctcccctcaatgcacccagccccattacaataacattctgtgacccacccttgaaggggtcagttgaccctaatgtgtcttttccctgcccggtgctgtttgtgccacgaggacaaaaccaggttgggcaaagcagagtcaaactttattcgttgatcaaggaatggggaaggggagctcatgttcaaaccaccttctccctaaggcatagggcaaagggggattttaagggcttttagggcaggtaggtggagactgggccagggattcctggagaaaggtgggttcttccaggaggggctggaccctgcacagtcttgtcttttgcacccagcactttttgtgcctagcaaggtgcattgctccccctgggtggagattttctcagggtaatgaggcaagagttcagtcaaggccgcactgctcggttcagctcatcctgtggctggttcgtggttattggcttccagccttcacttctgcaagcacagcagcaagcacaggttaatttcgcaggttgcggggcttttctgaaaaaactaagatcatgctgcagtgacgctttcactatgtttctcacacgatgtagatctggtgaattgtaggcacttaaagaattgtaaggtctgagtctcatctcctactctgacttcagccaaccctggagatttgcctcaggtgccacagcccacaggccatccctccaggcagcaggtgcccaagatgcagccgtcacaggccccagcatgacaggcagggttgagctccaccaatagcgagtgagcagccatgtctgtcccactgcccacacccagcctctcccacccaggccctacctgggatgccgggtagatcattccagaacaccagagtcagaaggagcttagaacccagatggggaaatggaagccaacgtcccccaggagccggcatgaggaagctggattgaggccctgcttcctggtcaccagtcatcctggtgcgtcctcgagtgcccatgccccttcgcacctgctctctgctttttgcaccaatggcgtaaaccccacttggatttagctcttttctgattctaaaagtagcacagactgagtgtagaaaattagaaagacatagaaaagcatcaaagtcaataaaaaccacctgaactccatcacccagcgatcattttggtgcatttttcttctagatttcttacccccgccaaaaaaaaaccagggttcatttgcctggtgagccacaaaccactcactgtgagaactcgggttttgatcaataggagcttcattacttggcacaagtaaggagggtgctgggtgtattctccaaagcacggtctccctgagggaaagtgacggggggctttctgggtgatggagaggggaaggggtgcatcacagcatacagaggaggggtcccagttgcacagatgcagtgagtcatcatgcggcacataggtctcatgtgctggtgatgaggctacagctccttctgggcgggagacttcagcatggttgtgagaaagttcactggagttcatccgtaagttgccggtgtctgtggggtgcccgttttaaccaactaggcgactgcatcccacataggggttttttttgagacggagtcttgctctcgtcacccaggctggagtgtgatggcgtgatctcggctcaccgcaacgtctgcctcctgggttcaagcgattctcctgcctcagcctcctgagtagctgggactacaggtgtatgtcaccacgcccggctaatttttgtatttttggtagagatggggtttcaccatggtggccaggctggtcttgaactcctgacctcaacagatccacccgcctcggtctcccaaagtgctgggattataggcgtgagccaccgcacccggccccacatagggttcaggaggaaatgggctgcagagtgggaggctgtccaacaggctgactgccaagttgatcatgaaatttctatcgtccctggaaccctccctgtctgtgtacagagacttttctgtttttatgtgaatgtgtgcacacacccacatacacacccaagcatacccttacactcacacatgcacactcagactcacactcattcactcacttatatactcacacacatgcacaactcataatctcaaaatcgacgcttcatacacatcattcttcatgtgatgagtaaacgcctcaatgctgcagttcttggaggcctcgcccacgatggctgctccttgggggctgaaccttctccaggatctagagctgccacccagctactctttaaaggagcaggaagacacgcatgagggcatcctgcctgcccctaacaatgtactgctgccaccagacaaaggaatggacagccatccctctgcggtggagcagaactgtctcctcgggcccggctgggctgaggggtcgtggccacaggctggcagcccaaggacggggacatgggacatgagggcactgaggagagtgtggggacagctttgtcctcagaaagaagccacccttgacctcattttctggtgccacttccaaatttcacatgtgctctactcttgttaagcatctactgtgtggggggcactggggacactagagtgaggaagacccccccctttcctgttgggacacggattattcctctacagcatggatgcagcttcttgttagcttatccagcagattagctgtcctgaatgcatacccacttctctgtgccagccaggcaaatctcacgggagagtgggcagacgtgggagaagcaatccaagacggcttcctggaggagggggtctatgagcccagggccaatcaggacctttgtgtttggagaacaggaccctgttctctgcctgagaaggccttcccccagatggaatgcctctccctcaggctctgcttagatatcccctcaaatacccggtcacccctggcctactttatcctctgataagccctgactttagataggatcgggctaggggagggaaggtggctcatgaaggtgcctgggcacacagaaagttctcaccagttgcagacagtccatggggtaggtcggctagaagcctggcattgcctatcacccacagaaggcagtgggaaggcagggggcggccggctgactcagcctatgccctgtctcacggcagcctcctggccacgcatgtccaaatcctggtctccaaaagcatctgggagccgctgtcctgcctggtgagccagggggcctttgcaattccactcattcctgttgagcccagagaggctgagccatggccaggggtcatagagcacactggagagtgcccggcaggccaccatgaccagggacacactcctactttgccacggctggtggtgctgcctgtgggaagagaaatatcccaggacccagaaactgctcgaggcacccagaggctgtgctcagtaccccagaatactgcaaggaaggagaagaatactgcaatgggctgagcagtgcccattattcagatgaggaaactgaggcgcaggaggtgatgaggatcaggtggtctgggggcatggatattttggaaagtagggaaactgagcagacccaggggcccagggatgtaggcaaaactcttgctcactcgctcggttctcaggtgggaagagagctgtgctttgtgttggtggcctggcctagcaccctacccccgtttccacagagttcacagcaacactgcaggtcagggcaatggcccagagatggaatgggaccaggcaggggccacacaacaaatcaatggcagggccgggtccaggtctcagccccatcctggctccgccattcagaccccagccctgtctccggcctcctgagcccctggcttgaggctgggttggggaggcttgggcgtgggatccctcttccacggtgggcttgtcctggtctgggtggggctaaagtgctgagctgcagggtccaggggacaccaagccccctttccaccctctggttttcttgtcagtcttagggaaagagcttaggatctggggccagcaagcctgggttcgagtcctggttgtgtgacctcaggtcagagacagctccttgctagcctcatctgcaaaactggggtgacagtactgcctgtctcatgcccgttatgcctgggcatgccgcctggcacacagcagctgctggggaagggccgtgaggtggtttcccttcctcccagtgccatgggcagcatggggtgggtcaggctgcaggctccagctacccctttgaggtgctgtgggagccctatgaggcccttccctccctgaacctctgtctccctagatggggtaccagcaggtgggggcctctgtgctcaaccgtgaaccaacgtgggcatgggatgggggtgggagacaaggtgggaggcccagagcaggaggtgaggggctgagggctcagctgggacagggaggcagccacagggtctttggagtgcccccagtgaggcaggaaaatagggtctgaaggcagggaacataaggccaattcccacttcagctaggacaggaaatatcctctccgtggggtgtaggccaagtaaataactttgtaattttacttcatcctctctatttacatagggtgtaccccaagtaaccagtggaatcctctggagggtatttaaactcccaaaaattctataacggggcacttgagccgctacgctcgggcctgctccctcactgtggagtgtactttgattttcagtaaatcccttcactccttccttgctttgtttgtgtattttgtccaattctttgttcaagattccaagaaccaggacgctctccaccattaacgccatctccctgtcctgttccacttcctgcctctctttcccccatctctgtgtctctagctgtgactctgtcttcctgtttctccatccattctctttctgcttcagtctcattgcctcctgtctttggccttgtgttttctccgtctccacttctctgctctctcaggcactgcttctcatcctgattctctctcctctcaggcatcccagagttctagtgttatcggcgccctgggtccttgtaatctgccaggatagaaatcaagagcgatcaccagacatagcagcaaagagaaagagctttatttagcttgtgcacgagggaagtcagcaacatgaaaggaagagggcaggctgctccccaggggagtgtgtgggttagatttctagggcctttctatggagaggggtttcagggttcctccaggggagtgtgtgggttagatttccagggcctttctatagggaagggtttccccaggggagcgtgggggtcagatttccagggactttctgtagggaaggattttgccagggcatgtataggaggaggggtttctctagcacttgcacagtggctcaacacactttttcaaacattgcatgtaacatcagcattttaaatctccgtgcttgggcacgatttgcagcattaaaatgaggaagagggtaagttgaagtttaagtctaactgcacatgcggggccccagggaagtccctagccccctagagcaggaactcgtggtgaatagtttcctgggtctttggctgctgattggctggaagtcaggtgagctacagtctgataaggggtttttgtactttttctctaaaccacatcaaaaccaggaaaccagtcagcctgcctgtctcacgagcccctatttcctgttgtagatggtgaccagcttgtcctggtttgcttggaactgtcctggttttcaaatgtaaggttccacatcctgggcaccccccagtcctgggcaaaccagaatggctggccagactgttgctgtgactggagtggggcataccctgcctgcttttttctgggccttacctgctaagtggtgtccaaggagaggccctgggggtctgggtgtgggatgggctggtgactcgtccctctgtgcccttcccacccactcttgccctcagtgctggtgcccacctggcatcccggacaccatccagggcaccctggctggatggcctgtcttcatgggccatggtgcagggctcaggctagagatgagtgggggatgggggcccgaagcccctgctgtgcctgatgtgccttcggtatgtcccgtccccaggtggctctgcacttgatgtcaaggaacacagccattgcaccacagcttggtcctctgacagtggcccagccacggctccgaggatatgcgccctccctgggcatttccaggccttcctgttggctgtgttctttgtcctgatcaacgtccccccgcagatccctccctgcacgcaggagttggtggtgagggactggccctgcgcttcggctcctagattctccatgcagcaatcacagcccaaccaccaactcctcactcatcaggagctcacacttgctgcaacctcaggcttctagacttcggctggggccatggatcgtggcctctgagctccacaggtcctcatgcatgatgtaggtgagatgtgttttaagtcctctcttggtgccaatttactcaatatgttcacaagttctaaccaccttggatacgggtttttcaaagctcagagcatattaggccggtgatgtaatataactgttaagggcatggacccagatggcctgaatctgaattcaaattctgtcctgtattagacccttttttctaagcctcagttttctcatctataaaatgggttcaatgatattacctaccccatgagatgttgtgagtattcaatgagatcatcacagtgcctggcatggaaaaatagcaactttttattgagtagttgttttatgcaaggcaagactacatttaacccccacacccatgggattcagagaggtcgggtaattggtctaaggtcacacagttaggaggaagctacatccctaaccagcaggctatcctgcctctgcagtagtaatgactaacatttacggagcacttgttatgtaccaagcactattcaaaaggcttgatatgttctaaagattttacttttaatcctcacaattctgagaggtaggtactaatattattccaatcagttagataaggaaaccgaggcacggggaggtaaagtctcttgtcaaagggtcacatagctggttagtggtgaaactgggatttgaacccaggaagaagcctagctgcagagacagtttttcttttttcgttttttttaggtgatgtttttaaccacactgttttttcttttaaaacagcctgtgtctttatcttgatcctctgagggtacctaatgcccaagaattatgagctgttattatcattattatagacaagaagctggaagaaggtgcaggaggctttgagggtaggggcatgctgacagcagagcatggaaaactaagagcagagctcaggtgcgtaggctggacatggtcccacggctcagcaggtgaaggggttaacagctcttcttcatggctgaaggagctacgtcctttctggaaagacttccatcaagttagggagaacaaacagagctgtgacaccatcagagtgggcccctgaggacaagaaattgacatgggggatgtagccatgaagtggtgactgccaacgtgcctctgatgtttgctgagaactttgtgcctctttccatagcctcatggctgcagtcccatttgagcctcagaatggtccctgtcaggcaaaatgactgctctgctttatagattagaaaactgaggctcagatgggagctgtgacttgctcaatggcacactggctcctgtgctgagctccaaccccaggctggaatgctcacacacccaaaggtgggcactgtgtgtcaggcctctgagcccaagctaagccatcatatcccctgtgacttgcacgtatacatccagatggcctgaagtaactgaggaatcacaaaagaagtgaaaatggcctgttcctgccttaactgatgacattaccttgtgaaattccttctcctggctcatcctggctcaaaagctcccccactgagtaccttgtgacctcacccctgccagccagagaacaaccccctttgactgtaattttccactacctacccaaatcttataaacagctccatccctatctcccttcgctgactctcttttcagactcagcccgcctgcacccaggtgaaataaaccgccttgttgctcacacaaagcctgtttggtggtctcttcacatagatgcgagtgaaactgtgatcctggtgtcacaggcctggggtgtatagagaagtcaaacatggcttcccgtgtaaactgttagtgtaatgcgcaaccttgtttttactaaccctatttttagactctcccttttcctttaatcacccagccttgtttccacctgaattggctctcccttagctaagagagccagacagactccatcttggctctttcactggcagcgccttcctcaaggacttaacttgtgcaggctgactcccagcacattcaagaatgcaattaactgataaaatactgtggcaagcaatatccgcagttcccaggaattcatctgattgataacgcccaaaaagccctgcgtctatcaccttgtaataatcttaaagcctctgcacctggaactgtttactttcctgtaaccatttatccttttaacttttttgcctactttatttctgtaaaattgttttaactagacccccctcccctttctaaaccaaagtataaaagaaaatctagccccttcttcggggccgagagaattttgagcattagccgtctcttggccgccggctaaataaacggactcttaattcgtctcaaagtgtggcattttctctaactctctcaggtacaattcagtattgacgccgagacagggtttgactatcagggcctggcatgttcagttttcagagctgctgaatctttatcccagtggtagaatcacaggaagaaaaggcccatggaggcttgcacttatgcccatttctaccatagagacgctgggtacccttaggcaagaccttgctcctctctgggcctctgtttgccacgtgggccttgaattagattagcgtttcttaacatgaggactcattttctcaacatgagatgtcaggatggggaggaccctagaacgggtagtgtctcagggttgagctgatgctccacagaacgtgggctccagacttgaactgactgacttgggttcaaatcccagcttctctactcactcctggtgtgaccctgaggaagcgtctaaacctcttagagcctcagtttccacattcataaaatgggatgaatgattggcagcttaattccctggtggggagaagacatgggctggtggcggggcctctgggctctcacagggctgaggacagccacaggtaccccacagtgcttatcaaacttgccagcagtgaccttggggctaaagctgacttgggcacccccatggtgctgttggaggagggcccgtggatggtggagatgtgcacccttgtggagctgctgctgtgtggacccaatggttcgctgcctcctgctgctcggactcaaagaggtgagtgctgcatgaggcaccctcaccctccagctcctcccctcactgtccctgtgccataggccctgccggactcctccccactgaggggtgagtgactgagagcagcacagacagggacagagcttcaggccaaaggcacgtgatgggaatggaatgatctcagcagcaggcccacaggagctgcacttccaggcagagatcacagttgtggggtggaggtggaggcctgggagggccctgaggggtggggcgactcctggatgtcatctgcacggaccttgggggaccgaacaaaggatgacaaacgtgggaataaagataaagacaaaagagtgtatttggaagaaggggtcagggggctccttgcttctagtgaacaagggctcttagctttacagcccttcgcatttgattgggtaaaggagatagggagaagtgggggtggttgtcgatcaggggcttaatttacagcaggcttgcaagactgcattcttcaaacaataggttctagatgtcccagtagataacctcaatgagcacggtgccagggccctcagcaaaccttctggcagtaggcgcagtcgtgagtttgcccacatcctgcattcatgataaacagtttgctgtttgatcatatagccagtggaatgctgagttggtcacgattcctttggccttttcagctccaaacacctgggagctcctctttgcctcacccccaatcccccttgcaggatctcatcctcagagccatgtttgtggttgatggatgcaaactcactgtctctgtggacatgaagagatgagcagaatggctgcaggcacaacccagacttcctggggagcagaggttaggcagctggcaggctccacagtcacagttgctcaggaagtcctttcttattgctgttgttcccaggaggctgcctctctttctgtccctctttccctgtggatccagggactggctccaaacctagcagggccagagctcactccctccttgctcccatggcgtctggtcacattgatggaaacggaggctcagagaagttgagacttgccctcagccacacagcaagcgaccagggctgagtgctggattcctgtcccaggctgttccaaggcagtccctcttggggagagcctcagagatgccctttctctctgctgtgcctccctcaccgggtcctcaccttccatgaggaacgttcctgtaagtgaggccagggcttggggattcgggcacattctctctgaaggatgaagggttgctggtggagggagatctgctctgatgcttcctccctcaccagcccaggtgtcagacctcagcctatgagctcccaagctccagtgtgacctcctggtgcccagcactgatggtcagctctgacctggacttcctggtggggttgtggtcgatagcactgccctgcctgcctgagccccacggccgacctctgagctagctccaccggcttcaggaccccacacagtgcccagcaggccactcaggcatccacacctgaatggaaggcgaggcgttggtctagtccttcctgcatgaaccaaggccctgcgagggatagggactggtgagtggtcacatagctgggaggtggtcgagctgaggtgtcacttacccagcttccccctggcagtgccggagtgctcatgtcctgcagcccagcagcctgcatgtggcagggctcttgtgatcaccagatcctgtagcgacctctggtctcgggaaagggggaatgagctagctttgcctggtgtggacaccgaaggcagaacctggactcggtgcctcagatactggctgagggcccccagctcatgagggcgagggagaggtatttggagggtgatgagaagggtggtcagtgtgggtctgatctcagtctctctgaaggcagctagctgggagtccactggagacatagcccaaaagagtgcagcagaaggctctgattcttttacgtagattagcctgattttggccttctaccccataatataatttaatatggaaacactccttaacagctgggagcagtggctcacgcctgtaatcccagcactttgggaggctgaggcaggcagatcacttgaggtcaggaattccagaccagcctggctaacatggtgaaaccctgtctccactaaaaaatacaaaaattagccaggcgtgttggtgcatgcttgtaatcccagctacttgggaggctgaggtgggaggattgctggaacccaggaggcagaggttgcagtgagaagagatcacaccactgcatccagcctgggcgacagattgaggctccatctaaaaaaaagaaagaaaggaaacactgcttaagtacttacaggtaaatttctttaccttgctctgcatgagattgccaccctgtgtcacttcccaacttgctggcttggccagggcattcctagaatgttttgggggccagtgggtatcatggcttgcctggacatggtggtggggataggttctaagtcttgatgactttatacttttttttttttcgagatggagtctcgctctgatactcgggcaggagtaccatggcgtgatctcagctcactgcaacctctgcttctcgggttcaagcgattcttctgccatagcctttcgagtagctgggattacaggtgtgcaccagcatgcccagctaattttttgtgtttttagcagagacagggttttgccatgttggccaggctggtctcaaactcttggcctcaagtgatctgccggcctctgtctcccaaagtgctgggattacagatacaaaccactgtgctggccgactttacactttctaactctggccaagattaatagggttggtgtttatttatttctttctttatttccccctctctctctgcccaatgtcctgggtatcagctggtgggcaccattgtgaggccgatagagtaggaggtggtgtgcccattgtgtagatggggaaactgaggcccagagagggccttggctggactccagggctcccacttctcagcccttgcttttctccctgtccatttatggacgagccaccatgagattgtcaccctgagattgtcttgtccagggaatgctgctggtgtgcttgtgaccctgaccctagcctctgtgaggaccctcaaggagtgtcccctggggacttgggtgagggcaggctgtgtcagccccctgcccatccacagcgggccttatgctgcaaataaacgtcactgtttgctccaattcctagaacctgaacctgtgccgtctcctgtgccgtcaagagccctcctgttcactcacccgacttctatttatggggcagctcttgcatgacaggctctgtgctaggctctggggaccccacttatcacacagccggcaagagcctttcacactggcatcctgggggccttaggccacttctggcagggagaaggtgaggacaggcatctcctggtgcagatgaggaaagtgaggctcaaagactgactcccttgggcactcagtgaaggggcacaggccaggggaagggcctaggctctgtctcatcactgggcccttgccactgtctgtccaggggtctcgtgcaggggtctctgagtctcatcactgggcccttgccactgtctgtccaggggtctctgagtctcatcactgggcccttgccactgtctgtccaggggtctctgagtctcatcactgggcccttgccaccatctgtatggggtctcatcactgaggctctcgccaccgtctgcccaggggtttctgagtctcagagaagcagcctgccccagccatgcctggtctggcctccagggattagcggattagctaaaacctcagggcttgaactgggcgtaacggaggcgccactctggcggccctgtgggtggttggcactctgcacctctggttcttgtcttggtcgccttggatcccaccctggctggcagccgactcctctgctgcagtccagtgggtgggctgagtggcgggcaggcggccagccttgtgcattgtggacctggactgggggtgggtgggagggagacttttgttctcctgctgccccagaaacgagcccctccccctgctgggctgaatcaaagtcctattgtgggacttgggtgagactgggtccctcgcagggcctcagcctccttgtctacgcagaggggctattcaactgcactgtgaactgtaatgctccatccagggactgctgaccttggaggacaggagggagtgtggggaaggggtgggtggataaagggtacctgatcatctggtcagggggctgagctgcatgcagtggggctcctcggatgtaatgacagaactcccattcattgagcgcctgtccattgtttgtgcgacagtctcagccatctgggttgggggagggggtgggccaccatctgctcccttgggcatcactgtaagaaccagggttcaaccctctactcacggctccacggagttggctcagccaaacttactgggacctgaatggctgtgggaagagttgagggggggaaccaagcattttggggcctggcaggtctggattgggggtcagagcatcactgtgactcactgtgtgaccttgggaagctgccacatctttctgtgcctcggtttcctcatgtctaggggaatgttcagtccccatagtcgggtggagatgtggtgacaggtgtgacacaccgtggattatgtagtgtttgtggaccgggtgtccccctgggagaattacatgaaccctcaggagggtggcatggggttgggggcaagtgccacatgagtgtcaggcagcaggagctacctccaccacagccctgaccacagagaatgtcaccaagggtaaggatcccattcatcatagtcctaaaactggtaaagtatccaggattaaatctcgcaagaaaagtgcagaattcatatgaaaaaagcgaggatacctgactgaaggacgttgaaggaaaaccataagaaatgggagaagaatctatgttttgagaagagctgacatggccaagagatttgttcgtcatgcataaaaccagtgccaattcagcagcattttaaaaatgcaagttgacaagctgattctcaagtttgcctggaaaagaaagtggatgagaatggccaaggaggttttgaaacaggaagaaagagggggtgctggtacgtaccaaatatattccaaagctggagtcacagagcatggtggtcatgcaggacgagacagggctcagtgaaacaaaaaagaggccaggcactgcatggagagtgtttccaagctctgggaaaagacgaaccattcaatgatgatcccatattgtggtctttgggtagtaatacacaaaaattaaattagattccctacctcacaccatgcacaaaaataaattccagatgcattaggagcttttatacatttatatattgtgtgggtttatgcaccaacaagtgtatatatattcatatatatgtatgtataaaatgtgtgtataataaaattaacagaggaccagcctggccaacattgtgaaaccccgtctctaccaaaaagtacaaaaattagctgagtgtggtggtgggcgcctgtagtctctgctactcaggaggctgaggcaggagaattgcttgaacctgggaggtggaggttgcagtgagccgagatcacaccactgcactccagcctggacgacagagtgagacactgtttccaaaaaaaaaaaaaagattagcaggagaaagtacaggagtatatgtctataaacttggaactggggatgtccttcccaacaatgcacacaacttagatgccataaagaaaaacattgaggtgataatattttcaagaaaatctgttgaacaaaagacacttaaagacaaatgattgggaaaaaacacagaacagctggaggagtgagcctgggaggggcatgtgggggtgggggaagtggggtttttcaatggattcgctttttagcaaacctcagtttgatttggctttttaataacaagaatggtttacagaaaaactaccctaatgatgccaggctggacgtgtatggcttccaggtgccctgattgcttggaggagcagggagcagcagggatgtgaggcgaccccttgaagcccattccactgtgaggcccatcagagatgggcctgggtcaggtgctggaggaaccctgggtgctggcgtggaggcctggcaaatggccagaatggcggattctgcagcagggatatgaggcgaccccttgaagcccattccactgtgaggcccatcagagatgggcctgggccaggtgctggaggaaccccgggtgctggcgtggaggcctggcagatggccagaatggcggattctgcagcaggacgggctggtacagggtgccctccctggagacaagcatatttccgatctgtccacccttctaatgcccagctggccctgtgccagagtcttcacttccctgcccttgcctgctaggaattccctccctcgaaggctccagttcctgctgccattccagctgggccagcctgccctattctggagctcagcccctcccagaggactaggcctcctatcacttgcctggggccagaggttgacaataaccttgagggtcatttacccagcacctatcatgtgtcatgctctgtgctgagagctttgtgcacacagctcctgtaggttccaggaataggcactgtttttagcacctctataagctctcaagacaatgctagagcaggatggacctcagctatggcaaagattacacagacaaaatatgagtgactgaagtttgggaaacaatacttacatacctggaaaaactgaagtccagagagggtgtctgacatgcccaatgtcacacagtaaattgtcagtatgacgttgaaacactccatagtgggtagggttgggacctctcatctatcaccttgtctgacacaatagtcataatcctgtccctattttatggctgggaagaccaaggctcctagagggtagggtcttgaccgatgtcacacgtagtttggggacagagcttaacttgaagcaagaaaggcttctcatgtgcaacagtcagactgcttgggtttgaatcctggagctgccatttgttgtctgtcatctgcagcaagtcagtttgctgcttggagccttcactgtccccatccgtgaatggggtctcctggggctgctgagaaggtgcctgggcacccggaatgggatcaaccattgctaaccatcaaatgctcagatgtgaaaggctagcctactccctctctttggggccaaaagacactcagacttggtctgggggtaaagaataaattttaatctctcttagggtaggggttctggtgaggctgctctctgggcggggccacagagccatgcactcgcacgcggtacaggcaagtgaagcctgggttcccccagttgcttgagatcttcaccttgaccgcactgaaagcccgggccggctggttctggaagagaatcagtcacagaggcagctcacccatagactcccaccctgcctttccaaaggtggggagtggaagggaagtttcccatttcataggtgggaaaactaaggcccagacaggaggatggactgtcccaaggcctcacagcaagtcgatattcaggagctcttactgaagatgctgaggccagaaggacagacatgctgtgggtaaggaaatgtcctggccttaatgctgtgggatcttgggcaaacctccaccctttctgggcctcagtctcccactcctgccctgccccgcccgtaagatgggaatggtaatatctgcttcccaggattgcggtgggcatgaaatgagattttgggaacaggcggcctctagaagagaatcattcacagaggcagctcatccacagactcccggcacatagtaagttctctgtaagtgaggcccctccccgtttttgccaagcaagagggggtggagcctgtgtttattactctccctatctagtgtaaaaagtggggcgggcttggccttcactgaatgttttcaacctcccagggaatgacagaaggggaaaactgaggctccagagaagcagggcttggcccaagctcacacataatttgtggttgggcagaaattcgggccagtatgggtttgattcccaagcctgaaccttcaccctgtcaagccccagggccattccagtggtcactcctccggacctgcttctgtctccaaacccctctccttcaggcctcagtttccccacctgtggttggatccagtgataattatggggccacccactacggagactctacctttggagccagcagcccctgcccaatgggaacctcttgctcagcgtctgctgtccccgggaagaaacacagcaagagggctcctgggctcatcaggaaaaaggggacatggccacaggcggtgggatctccctggagtcccatttggccctgggtagcggctcctactctctgagcctcagtttccttgcctgtcaaacaggttagtcatgactgggcacctcctggggatactgggggatgaagagggggtccctgggtacagactgcacactgtgcattcagcaggtgctcagcacaggcagctcttcgcaggtacctggagtgggaacatctggatgatgttttctggctgaaactgaaatgcccccaggaacacctcctccttgggggagccctccatgccctgtggaaccagaaccaaggtgaaggcgtcagatacaagcagggccctcagagggtgtctcccctctccagtggagacttgcacactccccaggatgggagctcactacctctttgggcaccgtttcactgtggcacagtgtaatgaataggaaagagcactggcctgggagtcagagcctgggggtctatgactagctctgccattgacttgtaggattagggtgtttccctgatccttctctggaccttatttcaccgagacagttcagataacgcttcggaccttcttagcaaaatgggggctccatggtctctgaagattatctcggctctgaaaagcttggtttaaaatagagtagctgtttatcccctacccttgaaggctgaaattggaccccagcgctggccacttccagccttaaccaagctgcattcagcccctccagcctgcaagtgttgtgcagacactgtttaccccaggcctggaatatcaccattggaaggttgtccctttagctaagcatagctccctgcaggggagtgctcacatagatgacgaagtccttgggggcggtgtccaggctgcctgacaatgagatggtcttggggatgtgctgcagcgtgaggttggacaggtaaaccttctgagccaattggatggtcacctggccgcggtcaccctcaaaggcccagcaattgccaggtgtcacgttgggctagaagaggcaagtacaataagggatatgctgggtgggtagggggatcatcccacctttgatcccctgtacttcctgggacctcctgggtgagccagtcctttcttgtctccaaagcttggctcaagtgccaccccctccaggaagctctcctgactacccatgcagggggtaagccttacttcagttcaatgcagtaagggaggggcctgcttgggacctcccagcctccacccgctccccactggcacccattcattcattcatttactcactcactcattcattcattcactcattcatccctcccattattctttacatggtcttacaatcaccccatgacttaggcatcatcactatccccgttttgaaggtgaggaaactgagttgggggagcaggacaatgactggtccagggccatgcagagctggaagtgcagcccagggaatctgaccttggaacttgccattaagcaccacgatctcctgccccacagacggggaaacaggcccagggagagaaagaggtttgatggaaatcacccaggaaaggcgattactcggtcggttctgagcttctggagccatggcatggacagtccttatttgaacagtggatgctagcccaggggtgcagggggctgtgggtgtcagggaaggcctcctgaggagctggggccaggggagatgaggagccagctgggaaagggagctaagggaacagcacgggaaaggaccaggggcgagccaggcttgatgatgtgaggacctggagagctcagtcaggctggagctgggagagggcccaggaggggcagagtcttggctgggctgcttttcactactgctccaaacctgactgcagccagcgctttgcaacccagccactgcccgccgcgtcccccgccccagcctggatgtgtgcaccaccccccactcccgggccctgtgcttggcctgtgcccctgcgttctatctgcctgcggatctgctagtcctcggctgcggccaccaggaagccccttgccccgtccaagctgagcaaggccaatgccccagcttgacctcgagtgccaagatcttggagctccttaaggtagaacccacggatgagtggcctgtgaccttttggcatcacccagggtgtgccactgggatgacactctcagccagtgttcactgaatgaaggcacctgctttgtgaccaggacaagccctttccttctctgggcctcattttcctcatctgtgaggcaggatcctggagggctgaagagctcaggtttgaactctggctctgctacatactagtgaccagctctgtggccacagtcaagtgacctggctctttgagcctcagtttccttttctgcaaaatgggtctatgatgggcccatgcccagtgtagtcctgaggtttctctgaccctcaaatcttaagggctgagtggtggggtccctcccaatgccaaagcaagctgtccctctgtttcgctcctaccctagccccagcagcccctgctgtctgttctcacctcctgcccccgccttctccccagcccccgccttgtcagtagccccctccttctgctccctgcctttgcccctgcatctgtctcctgctcctacctctaaccccgcccctgcccccactccctttgctcccaccccctacctcttctgccagctcctgtccccaaaccctgcccggaccactcccctgccgctgtcccatctcccgccatcccccctgcctcaaggatcacgtctgggggctgtgcgtagttccacagctggatccagttccagtaggagtgggccttctcatggttataggtgactgacgtgtgctcaaagtcaatgctggcccctgtataggagaagggggtctcagccaagcagccgggcttctgcctggtggaggggacgccactgatgggccctgactatgtgccgggcgagcattttggatgagtcactggccctgttctcctctaggaaatgtgattacagccatgttaataatggtaatcatggtggctattattttttattttatcttatattttttgagatggagtcttgctcagtccccaggctggattgcagtggcgcgatcttggctcacggcaacctctgcctcccaggttaaagcaattctcatggtggctattattagcagagccatggtggtggcaacggcccccacgtcatagggctgctgtggcgctgagatgaatcatcagagcacgtttcccaaagtgcctggcacagggtaagcgctccccacgtaacagtcttgtgatgacgaccgacacccattgtgcagaggaggaaattccagctctgagaggctaagtgaggcccagtgtcactcaggggctgggctgacactatctgaccccgcgtctcactgatcctgggggtgcccgagttggaggtgctgcctggtaggggtttgcgttgggggcagcctgcggcccatactttgcctcctcccagctgtccctgaatggctctcaccggcctcctcacagcctccctttgtctggagtactttctctcctcaccaagtctcagcccaaacgttctcctgagagggaggcctctctgcccaggtcccctccctcctcgccacctgccttattcttccggaagcactgattattattttatttatttatttatttatttatttattgagacagagtctggctctgttgcccaggctggagtgcagtggcgcgatcctggctcaccgcaacctccgtcccccaggttcaaacgattctcctgcctcagcctcccgagtagctgggattataggtgcccacaaccacgcccagctaacttttgtatttttagtagagatggggttttaccatgttggccaggctggttttgaacttctgacctcaggtgatccgccttcctcggcctcccaaagtgctgggattataggtgtgagccaccaagcccagccctgaagcactgattcttttttttattattattattttactttttttattttttgtgagaagcagtctctctctgtcgcccaggctggagtgctgtggcgcgatctaggctcactgcaagctctgcctcccgggtttaccccattctcctacctcagcctcccgagtagctgggactacaggcgcccaccaccacgctcagctaattttttgtatttttagtagagacggggtttcaccgtgttagccaggatggtctcgatctcctgacctcgtgatctgcccgccttggcctcccaaagtgctgggattacaggcgtgagccaccacacctggccgaagcactgattcttgactgcgggttggagatggctctgtcttgctgacctgtgtgcccagcatcgggtttggagaagagtggtgggtgggggtggtggagaggtaaagccaagaacagcctaagcacatagtagggtctttatagatcttctataatgttgagggcctgtggattcccgtgttccctcccaccccaccccacccctacccccataccccaccccgtcccagaaccccttgagagaaaacaaaattgtagcaagaaaaccagcttggaacagaggatgaacttcccagcggcagagggagtaccacaccagaactgaaacccaccctgtgtacagcttcccaggacacttgaggcagtcagatggtggggaagggggtcacctacctatagacttcagggcaaagtctggcttttcgatgtaatctccgtgtatcatcttcattattttctgggccattttttgctgaaaaggcagaaaacacaagttgtgccctggtgtgttgtcacggactgtgatccccacgtgtccacgggaggtaacagggggctgcaggacgctgtcctctccctaacagcccacccctgcctgtggaagcctgtggctctgtgaaagcccaggtgacacaaagccatcctgaccccaccctgggttcactgggtgctttcaagtccactgtgaccagatgtcatatggaggtcccggagtctcagtgaggttcaggcaggggctctgacgtcaggccaacttttactgttgtggggccttgggcaacttactgcccctctgagtctcgatattctcacctgtaagacggggacaataatcgtgtctacctcccactgtggatctgtaaagcccctactatgtgccagggctatcctcggcttcacatatgctcaccctatcccctcccagcacccctaagaagtatgcactattatcatccttgtattaaagatgagaatactgaggcacaaaggtgtagcttgttcaagatcacccagctggtatgaggcagagcgatcactgtggttccagagttcaggcccttaaccgctccactctgctgccagatgcggatggcaaagcacttagcacagtaggtgcacaataaataccagctgttctttttattagactcttcacagtggtggaagattctgttttccaaaaatggctgcaacaaggtctcccattccaggctcttctttcagtgtgacctcccactgagagttggggtctaagctcccttcccaccagtctgggctaatgacttggcagaagtgatgctgtgtgacatctagggctaagtcctaaaaaatgatacagcactgcctggttctctggggacagccactcctggaggccagctgccatgttgagaggaagcccaggccacacggagaggccacagatgggtgctttgatcaacagccgtaactgagtcccagttgatagccagcatcaatctccagtcacgtgagtgaatccagatgattccagccccagatgtagagtcacctccagccttcaagtcttcccagctgaggccccagataccatggaacacagacaagccatctccactgtgtcctgtctgaattcctaacccacagaatctctgagcacaagtggttgtttcacacccctaagttttgggatggtttgctatgtggcaatggtaactagaacaatagccagggtgttacaaggcagtgattatgattctgtcttgttgatgtgcaaactggaggctcagagaggttgatgacctgcctgaggttacacagctccaaaaggcaaaaaaatccccaactcctcccctcgtttactggggacaataatctcacctattacttttcaaaactgggtcgccaaccctaaggaatttccctgatggcccccaccctttctctgccccaaggctgagtgcagtcttcttctctgggatccacaggtgctgggactggcttgagggcaaggacgagctctagttgatccccgatcctggatccccagcacgcagtaggcacttaatgattgcacattgatgagtgcatgcctttggattctgcctttgtttaaatgcaacacacatttagggagcactcaccataggacagacattagtctaagtttacatgaattaccatgtttaatccttacaactcatcttctagatgaagaaactgaggcacaaagacggtaagtaaattgaccagagtcacacagcttataggtggtggggatgaaattcaaagcctagcagcctgactctagagccagtccttataatcactataccttactgcctttgtaagtcatagcggggcttccctccccactgcagaggaaacacctgccaagagcctcacttgacagtgagtgactgacacggtctctcctcctgggtctgtctgaacagagcttagaggggagattcaggggcactggagacctaggactttgggacaataaaagataaagatgagttttagcaaattttgctgaatcttgcacaatggaatttatctttgtgaactcttttaaaaattcaacttctaggtaaagttgatggatcgaagacatcacgtaattttagtttctcccaacactccattacagcttcagtaaagggatttgaaaagacccaaacccatatgaacaggaagcacaggagaggagaaaaccaggctgctgcgtatggttgtgcacgttgcgcacagcagaaaggttcccagttgaggggccctgtgtgggtgctgaaacccagctcttcccctgttctttgatttggaggaaggtgcattttgcgaattcatctgcccagcacagatagttttttccagtctgcaaaaaggcacaatgtgtcccagcagtggccctggagacagcagcaatattctggaagttgtcctacaccttgtaggatgtttagcagcatccttggctacccactagatgccagtagcgtctcctcctcacattgtaacaaccaaatatatctccagacattgctggatgttccccagggggcaaaataatccccaattgagaaccactgatttagcagaaatgagaaatctgaatccgaaactggccatcctcaaaaagctcaggattggtggccttaggtgcccctgaaattggggtagagaattgggtgttaagacagttaagaggaatctgcatattccctggggactccctctcactctgagaagctgagtggacttctctgttccccagtagaagactagaagttattctctggagagggtaaaacagaagggctctgttgggacaggtgaaggtttcttaaataggatacccaaagcactgcacaaaaaaacatagatacactggacttaattaaaattagacatttttgttcatcaccattgagagtgaaaagccacgctatagcctgggaggagatatttgcaatatgtacatccaataaaatatgtttacccagaacacagaagaactccgacatatcaataagaaatggcactctcccccaaaaggcaacagacaaaatccaaatggccgctggatacaagaaaagacactccacattattaacaaccagaaatgcaaattaaagccatagtgagataccacttctcaccctgcagaataaagtaaaaaagacatatgacaccaattgctggtgagaatgtgggacaactggaatttgcatatatttttcatgggagcgtaaattgaaaaactatttggcagcatctaataacatgaacacactcatacctcatgatccagcaattccactcctagttatatctaccgccaagatcaataagtatatatgttcacccaatgatatgaaaaaaattataattgttcaggagcagacattcaaacaacaggagcttcaaaaataagaatagagcaaatgctgctgtgggaaatcaccaatttagtcacatgaataaataacatttcttaggcccaaaggccaggagtttccagattgacggattccaaagggtggccagcccataggcacatctgtggaagcaacaaggaccagatgaactaaaattctgcagagcagaaaaccattctgagatgtgctggcattttttgtccgtttgttttaaatctctgggggtatttgacgattctaggcataggctaaggatctgggcttaggccagacaatgggctgctgctactggtgaaagagaaggaagcaaagttcttaatggtgacaaagagctaaagtaacaaaactggggacttgaggagcctcaaatatggccacttttcttcacaaggtattaactgaatttcaagactataggaggctataggccacttcaaacatttctgaaaagcagaataaaacttcatatcttcacagtgcttaggaaacgaagtccctttgagggagggcaccgcaaaacacaacaagcaagagatcaaggccttagaacagtgattctctctggtatatgtcagaaccacctggaaggcttgctggaacacagatgattggtttgcatcttcagagcctctgattcagaaggtctgagtgaggcctattaattcgaattgttaacattttcccaggtgatactgatgatgcaggcacgtgggccgtgggccgtactttgagatccattaccctagaaggggtggtgatgagtcaatactgtgcttcagctgcacttcacctgggggcactaaatcaatcctgggcacaattagaacccaggaatccaagtttgctcctggcggagaaggctgccaccaggcccagagatttttgcgttcatgcaggggtgagagacacatttggagacttgtgaggcctcaaacatacagtaagtctgccactaagacagttgtcaaatttttgaagctgcatgggaaggagtctaaagagttaagcttaaaacctctggataaatttttttaaaattgtgatccaggtctgtctgaactagcttagtgcatgtctagatagaagtgaccagtctatttcatcctccttataaagaaaaggggaactttctctagtggaattataattatttggaacagctacagttcttttgtatacaatgttgagaaaccactaaaagttactagacttgaagaggcaagaccatatcattgatacccaagataaaaagcagaaaacagagggaggccacagatgatccagacattggagttagcagacaaggatttttaaaataactgttgctaatgtgttaattaaaataaaggaaaagatggacaacataggtgaaatgttggggaatttcaccacagaattaaagtctgtgaaaaaaatcaaatgtatatcctagaactaaacaatgcagtatctgaaattaagaactaaggctggatgcagtggctcacgtctgtaatcttagcactttaggaggctgaggcaggtggatcacttgaggtcaggagttcaagaccagccaagtcgacatggtgaaaccctgtctccactaaaaatataaaaattagctgagcgtggtaatgtgcacctgcaatcccagctactcaggtgtaggatgcacttgaacccaggaggcagaggttgcagtgagctgcctgggcgacagagggagactccattaaaaaaacaaaaagaactaaatgcatggatttaataataaattggagagacagaatgatgcaagattattagtaaacctgaagaaaggttaataggaaaatatcaaaacataagcacataacagaaaaagaatgaaaaaacaaaccaggtaatagcgtaggaatcacataaagcactctaaaggctttcaaagcataggcctagcataggtgtaattagaatccaaggaaaggagacagataatggaaagaagaaatattttaagagataaaaggtaaaagtttcccaaaactattgaaaaatatcaacccacagatttaataagctcggcaaaccacaaaccaggttatatgaggaacattagagacaaaaagatttttctacaagctcccagggataaaaaatagatcatactcaaaggatcaataataagagtgccattagacttctcattagcaacagtataaactataatagagtggtgggcttccttcaacattctcaggagaaactatttcatatttagaattctgtacccagccaaactatcaaccaagtacaaggatagaaaaagatgcttttaaacatacaagcactaaaaatatacttctttcactgtattcctgaaagtcactgggggatgtgctccctcaaaatgagagataaaaccaagaaagaacacttgaggtataggaaacaggacatcaaacaaagagaaattagatgtttggggcagaatggccagcgtctcacctcatcggacatggcttccatctcctggagcttggcaatgagctggttcatgctacctcggaggtcctggatttccccactgtgatgtcgcaccttctcctggtacaaccttatcaggaaggagtgataacaagaacaggttgatttgtgatgcgttgttgttaccctcagattttccctttgctagttggctctcaaagaatgagtttcagattttcctaatctcttgggcccatccctggacccattcatcaggttattatctctaaaacattactcattctcttctttctgcttggaatatctttatacccagctcattccttccaaatattcctgagtattttgtctgcaattaaggatgctgccatcaggtggtgtcttggttaaaatttcttctcagctaccatttgctgagcactgactatgggtcaggagctattcaagacactttgcatcttctttagcacccataattgccaagagcaagatgggtgttatgcttcatctcataaatgaggagtcaaaggcccagagagaataggtgacttgcctaaggtcagccatgtagaaggcatgggagttaggatttaaacccaggttgatctgactgcagagcctatatttgtagccaatacaccccagattctggctatagctctgctttttaggtaataatatggttacccagaagattcctcttacctcaagctctgcagtggaccatttatgctgtcatcctggtggagtattgagaaagtaaggggtctccttcagatggcttaatctggccccaggagaacttcatccatctattctcccacaattataaacccatacattcatccactttcctgttgactcttccacccgtctacccacctatcatttctccaaactctaatttactgccctttttattcatccttccagacttttatccatccatccacaccttcatccatccacccttatacccacccaccctcccttatccatctgttcttccaactccccaacttcccccatctatttacactccaatccatataccctaacccatctacccactctttcattcatccatctatccaccaacccacccacccactcatctatcccatctgctcttgcatccacccatcatttcatccacccattcacctattcatgtattcacctagcctcctatctctttcccctagtcctacatccatcaaatccaaccttccatctgtccatcctcccatccattctctctccatgcacactcccatctggccatccagtcatccaacatggatagtggcaaccctgttgctggcaccaaactaaacattgctggggtgaataggacctggctccttccttcaagaagctgccagtacagttggagagacagtcatgaccacagaaaattatcggaggaaagaggaatgtgacaacttctgcctgggtgtttctagaggaggtgatattttagccggaccttgatggaccttgatggatatgaaggggttcataaggaggaaaagaggagagggagggacaggcctttcagattccctttctgaggtcctctgagactttttgcagacctcatgtagggagtttcgctacttatttcctcctccttcctcctcagaaacctgaaagcaaatgagtatcattgctgttaagcagaaggacaagctgccttaagtacagaaatgtgttccctgttatcaccaccccactttaagtggggccttgagaaaggagagatgggtcatctctgagagtcaatacaggagagccatcttggaggagggactattgcatccaatctttgaaagtcacctctggcagagagatgggttctaggtggatggtacgatgaagggtgagatttggatctgggtcaagtcaggaactgatgaggggccccatttggtgagaatgaatggagctgtggaggtgatattgactggttagggtgagacctgtcagctgtggggcctgaggagggtgcacactcacctgccagactttcattttcgatggtaagtgaatagaaaacatccagaatcctgtgaggccatgagaataagaatgagccatttaacatgcaagatgaagagcctaggtgctggagttaggacatctgggttcaaatcccagctatgccacttgccagcattgtgcaacactgggggaattacttaatgctctatgcctctgttccctcctctgtaaaataagaataacaataatatccacttcatgatcagatgatatcaaatgtgtaatacatggcacataaaccaagtcatctgtggctcccccttccctgttccaactctactggggataactggcaaagagaagaaggcgctctgcattttatgatctccatgctggctgaaaagccaccattcaagccattatttaaaagtcttggccaggtgtggtggctcacgcccataatcccagcactttggaaggctgaggcaggcagatcacttaagcccaggagttcaagaccagtctggccaatgtggtgaaaccccatctctacaaaaaaaaaaaaaaaaaaaaaaaatacaaaaattagcccggtgtggtgcacgtctatagtcccagctacccggaggccgaagtgggaggatcacttgtgccaggaagtcgaggctgcagtgagctgtgatccactgcactccagcctgggcaacagagttgagaccctgtctaaaaaacaaacagcttttactgaggcagcagaatcgcttgaacccgggaggcagaggttgcagtgagccgagatcatgctgctgcattccagcctgggtgacagagactctgtctcaaaaaaccccaaaaaccaaaaaacaaaaacagcctttaaaatttatttattcttcttgataaaaccctcaacgaactaggaatagaagggaaactcctcaccatgataaagaccatccatgaagagctcacagctcacatcctatttaatggtgaaagactgggcgcttttcccctaagatcagggatgagacagggatgcttcctcttgctagttctatttaacatggtactggaggttctagccaggccagttagtcaagaaaaagaagtaggccaggcgtggtgtctcacacctgtaatcctagcactttgggaggctgagatacgatggtttgaggctgggagttctagaccaaaccgggcaacacaacaagactcaatctctccaaaaaaaaaaaaatttaaacaaaaattaaaaaattagctgggggtgatggtgcacgcttatagtcctagctactcaggaggctgatgtgggaggatcacttgaactcaggagtttgaggctgcagtgagctatgattgcaccactgcactccagcctaagtgacagagacagaccctgtcttaaaaaacaaaaaagaagtaaaggtcgtccagattatcatgcagaaaagagttaaactaccactatttgcaaatgacatgatcttgcattagaattctaagggatccaaggttaggtgtcttgccttgtgttataactaaaaatcgggttcagcaaggttgcaggatacaagatcaaggtacaaaaagtcagctgtatttctatatactagcaatagataacctgaaaacaaaattaagaaacccatttctaatagcgtcacaataaaggtgttatttaggctgggcacgatggctcacgtctgtaatcccagcactttgggaggccaaggtgggtggatcatgaggtcaggagttcaagaccagcctggccaagatgatgaaaccccatccctactaaaaatacaaaaattagcagggtgtggtggcgcgcgcctgtagtcccagctactcgggagactgaggcagagaattgcttgaacccgggaggcggaggttgcagtgagccgaggttgcgccactgcactccagcttggcaacagagtgagactctgtctcaacaacaacaaaggtgttatttatcgaagtcctagttgttggattttaaagtgggacggttctctaggattcactgtctattttcccatggggagctgattctccctccctaccccacccccagcctccactccaaagccagtatatgtcagtggagggaggagattcctttgcttgggaaagctaagctgtgttgtgcgaggtgggggtggtggctggaaagaagccatggaaacccagaaagcggaagtaacaatgttcataacacggtttggggagagctttataacttctgaagcatttcttggcttctacaatattttcatggtcatcatttcatttcataattctcacagcaacacccatcaggcagatggggaaactgagtcacgtggcagtgcagtgtcttgcccagtgtcctataatcagtgccagggcccagggatacctccacctgggactgggcagggccctgggacacaccgaaagcacagaggagcagaatgcctgtcttctccatgagcttctggcacagcagcttgcatctggaaggcagggagtggtggtcaagatcaggtgggcaaggccctgccaagtgttcaccctcctcctcgtcactctctttctccgtaggcatgctgtttgccctatcccttcttctctccctggtaaacgtgtccttcaggattcagctcaaatgtcccctcctccaaagacctccacaggcaatgctcccaaccctgtgaacttggcaatgttttggtgcctgcctttcccacctgactgggagctcatgagtggcagggctgagctaggctcagaatagatgttaagaaaacatttaaaatttaaacttcaaatgaatgaatgaatgaggtggatatatctgctggagtttggaagaatttccaaggacagcaaaggaaaagggaaggaaagaatggggcaggccctccaggcaggaagaacagcatgtgctgggctgggtgcggtggctcatgcctgtaatcccagcacttcggaaggctgaggtgggaggatcactggagtttgagaccagcctgggcaacatggtgaaactctgtctctacaaaaaatacaaaaattagccagacgtggtggtgtgtgcctgtagtcccagctacttgggaggctgaggtgggacgattgcttgaattcgaaaagtagaggctgcagtgagccgtgatggcaccaccgcactccagccctggcggtagagtgaaaccctgtctaaaaaaaaaaaaaaaaaaagttaacagcacgtgcaaatgtgtggaggtgggaataggaataggaatggtgtgcccagggagtgagaaccctggccttgctggcccaatgggtccctggcaggaagccaagtgagagcagcttggaaaggaagggtgggacaggattccaggacactgcaggctgaggggctggagcaatggggggccacagtgggttctggggtgggagtgtttgataaaagccaggtttgggatagcttttctggtctggctaccaaggggagatccaaactgatggaggggctgttatggtccccagctgccatttcccactccccatccaccctccccctgccttccctgctcacctgcacgtgttaaacagaacctgctgggcctgagttctcagggagcaggcaaaacaggtgaaccaggctgcacgggagacagaaaagcagtgactcactacgccctcatctttgtcccactacaaggacctgctgacctttctggggctgggggaggccctggagctgggagaccctctcgacttgttggccgagcctgggacagaaccaggctctgcttatgggtacgcactagcctggagtgagtacaggtcactacaggtgggcactggttgccactggcagttaacagacattttctttctttcttctttctttctttctttctttctttctttctttctttctttcttttcttccttccttcctttctttcttttttcttctttctctcctttctttctttctttttcttttctttctttcttttcctccctccctccctccctccctcccttccttccttctttcctttttgacagagtctcactctgtcacccaggctggagtgcagtggcatgacctcggctcactgcaacctccacctcccaagttcaagcgattctcttgcctcagcctcctgagtagctgggactacaagtgcgtgccaccacgcccggctaatttttgtggggtttcactgtattggccaggttggtctcaaactcctgacctcgtgatctgcccgccttggcctcccaaagtgctgggattacaggcatgagccactgcgcttggccaataaacacttaatcgtgactcaggagcacaaaaggcctggaatgtaacaatgcccatttctagacactgggagcttggcaagagctggggccttgtctggttcatcccagaatgcccactatggagctaggcaaaaagtaggggactcagaattgacaggaaggtgagaggacacaggggtggatggaagaaggaagaagggaatggctgtctggcttggaggtggatgaatcaggagatagatgagagaatgggagactgaaaggatgggtggatgaacagaaagagggatgactgggtggatgtacctatgaaataaggtctgggagaactgatgaactcaacaggtggatggatgggtgaaaccagcagccagactggtggtagaggagggttggcagttaactcctcctccagacagcaagcctccctcccagttcccctctccagccaccaaagactttggcaggaatgatacctccgatgggtagaactccagagttcaacctgcagctccccaccacccctgcagtccagggcaggcattgccacccccaggtcagcctgggccgaggctggaccctctccccagacccatattgatgacgaaggtgattattcagtatatacgtacacacacatcccagcatgcactgagtcaggcctagggcttggtcattgttgcggacaggcaacaggatgttgtcatctgcagagagcacaggactgtcatgtcactgccagcctcttgatttggtgcttgcagagacctagggagcacccagagcttggtgcgaacatccctgcccctgccccttgctgggtagccccaggttgcccgtttgacatccctgagcctcagcccctcagctgcccatgaaaataccagggcacctgtccttgctcactcatgtttggggaggtgtcctctgccatcctgctggtgttccggcctcgctgggcaatcctggggatgataagattcatagtcgcattttacaattatgaggaacatagtgtccttggaatgtgcataccacgttccagattgggaaactgaggtacagagaaggtttcccaacaccaccagcctgtgattcagggacagacccaggtctggctgaccccaaatccaggtatccatcaaggaaaagacccaggttgctgtggcagtcacaggcggttgtcgccatgtccccgaggttggcagaagcttggttttgttcctttgtctgctcctacccaatgtgattttaggccattttgattggtcgaagcctgctgtcgtgctcccattccctgtgctgtgattggttcaagggtgaggaagtctgcaggggtgaggtagggtgaggtaggggggtggttacgaggtaagggacttgggggaaaagttaggtttaggattagctaaatgagacccacagaaaacgatgcttattctccttcccctagacgccacatttctgcgtgacacctgaaactgtggtggccatcttgtgaccatgagagggggctaaaagagcagaatgatgacaggaacctgggtcttgggtggcagaactgaggaattaacacactccggagccccctgcaccttgggacctcttgatatgtgagatttaaaattttcccttatttcttaagtcaaaggtctttaaacatttttgtttataccacctcagagtatttatattggtttattaataaattatatatacacccaattgtactaatacattgtttacccttcccaaatgtacagatttatggtaacattcctgaataatataaattaaaagaggatgaaagacatacattctagcctggttatttcttttctcacccttggggattgtttggtatactctcttgggatatacacccagatttgggtgcccagagataggcatcattttaagttggaatttctgtcacctgcattcagaggctttctgacagataaagatggcgaaatacttgtttccttctttcataccagtctcctgcactagaccgtgagctccatgagggaacggagcacatcagactggtgccacaccgtgttccccgtcctctgtgcatttcccggcacacagtagatgctcaataaatgcgtgctggaaggatggctgcttcaccacttcctggctgggagactttgggaataccactgccaaacctctctggtcttggtggctgtctctgtacagtacagttgacaatgccactcatctccaaggacagggtggaggggcagcattttgtaaactgtaaagggctgggcaaagggaggggctgccatcctcacctccggggtctgggattgtgggccacatcttcgagtagggcgcctgggtccccagggctccttgaggaccgtggcatcgatttccttctttaggattggggatggagatgggaactctgggagctggtgaggaggaaggggctgatgcctctgaatgtcccctgaaaagtgccaagtggaatctgccaggatcagtggagcagttggcattgtgacctcacagagcaggtgggtggaggggcaggggatggggctagtctccagcttggccctagaacctcccccagaggaagccattgtgacccactttcctttcttaagatggggaaattgaggcatcaagacaggaagggccatgctggggtctcagaagctggacaggggcgagagctgaagctccagtaacccaaccatgcttttccttgtttcctagatcccttcctgccccaagcttcccaggcttttcaccttcttaggttgcacctgaatgcattttgtaatgctgagcttctcactggtggacattgtgcataacacaaaataacattgcatgtgttgttgctttaataaagttctactttttgttgggcccggtggttgatgcctgtaatcctagtactttgagaggcagaagcgggtggattgcctgagctcaggagtttgagacctgtctgggcaacatggcaaaaccccttctctactaaaaatacaaaaaattggctgggtgtggtggtgtgtgcctgtaatcccagctactcgggaggccgaggcttgagaattgcttgactcgggaggcggcagaggttgccgtgagcagaaatcgcgccattgcacccagcctgggcaacagagtgagactctatgtccaaaaataaagttctacttttttactggggaaaataaaagcataaccgagtggaaatgtcgggctaagttttttctgttcaccctgcctgtagggagcttgactatttggatagcaaagctaaaatgaattcacttttgccccctggtggcagttgcttaaaattgcaggctaattaccaatgggaagtggtacgatggtccctcaaagaggcccacacactaaaacctgaacatgtaaatatgttaagtcacaaggcaaaagggagttaaaactagaagagcaatttaagttgctaatcagtcgatcttgagatgggaagaataccctagattacccatgtgggtgcaatgtaatgacaagggtccttaaaaatggaagagggaggcagggagatggcagcacaagaagcactcagcccaacatgctggctttgaagatggaggaagggaccaggagccaaggaataagggcagcttctagaagctggaaaaggcaggtggacaattcctctcctacagcctccagcaaggaacacagccctgccaatacttccttgattttagcccagggagacccatctgggacttcagacctccagaatggtaacatgataaattgtgtcttaagtcactaagtttgtgataatacattattgcagcaacaggacaccaatgcaaaacccctgagaatattcagtgaaggggaaactctgaaatgccaccactacaattgttacaagggtctttcaaatgtatactcattcatttattcattcaacaaatatttatgcacctagtatggtccaggtgctggaaacagggctgagcagaaccagctcccatccctgcggatgcaggcaaagtggctggcagaacattctgcatatagcaggtgctcaccaaacggtgcttgccattgctgtcaggagccggttgagatctgggatgggctggtgagaatctccctcttttatgtctactggctgtcacccaaatggctcttgtgctggaaatatttaagaaaaggaagtgtccaggccaacagcaaacaccaagagtgggtttggtcaatatttgcgcctctgtccactgagtctgctgtttgcatcagctatggtgagggcgcaggaggggccggtcttgggcattggtggacagaccaaggccaggagcagggtgtcagggagctcacagcaggctcttctcattcctctttgcgtctagaataggggcaagggagcactggttgggaggcagggctggttcaagtgagctccagctgctcaggggagggcttgatggtgtctgtggtcagctttgtagacactggtggaggcctagcacagggtgggcctgggagctgggcctgatatttgggctggtgtggggtcagtgggagtcaaagagtgccctggagttggggaaaggccccaagtcatcctgtgccaatgaagaaaaatggaaaggccatcgcctgctgtgcacacatatatgcacacacacaagaacatatatacatgtacctccccatcccaggaaacagtccacttgcatacacacatgcacctaacaccacacactcacagacccacaaacactcagtaggccaagcccacacatgcatacatgtacacaaaactccccacctctgtggtcctgttggattgtgtgaatagacacacaacaccataaaccaagatgccaacgtgcccatttcatgtccacactcacacataagagcacacattttccccgtacatgtgactatgcacacacactcacatgcatgtatcaacacaaccctcatccacacatgtgcatatgcaaattccttcatgcgcacacacagttccttgggtcccatccagccaaggcggaggctgacgtttgtaatgtggaaagagaccgtggactaatccattgtgagtggaatgtgcatttggagagaggctgggatgttaagctgtggggacaggtcacgcacactttctcttctgttcccttctgagttagggctcagtttgtgactgggatcagggctcagcatgtgatcagggtcagagctcagtaactggggtcaggactcagtgtgtgaatatgtgacagggtcagggctcagtcaatgactgaggatggtgctcaggtagccttctgcccctcctaaaagggtcatgtttccgagagagcttggaggtaccaggcttgaggggtcattgcagccatccccttgcctatgggaggggggatggggtcctcatgggccccatcctcccaggccttggctgggcatgataagataccctcctagaagcagctttccttccagagatctcctggccctcactaaggccatagctgcctagccccaggggcttgtagtggttgggagctgggcctggctactggctacgtggcagccccagcgcacatgtgggatgagacactttggcaaaggccatgtttgcagggaaaacacttgcaaccacaagcaaactcgccgctccctgggtcccttcccagtggactctgcacattgggagccttataaagtagcctctgcatctgcctgcctcgggcagaggagggctaccctggggctgagagttcacctgtctcaggaaccacctgaggtaggcatggggctgggctggtacaccacttccaaggaggcttggcttctctatctgttcagtggggatgctacctccagccaccctctgcagaagggtccttccacccctggccttgctgtaggacctgggcaagtgccgccatcctgggtctcagcagacccacctgagccgcagtccctcactcctgcctggctccctctccctgagtcagacacagatctgcctatttggccagactgagtcaggagaggatgggggccatgtgagaggcctactcttaggccatttaccacctggccaggaggggatgaggacaggagccaccctgggtcctcccctggctgaatttggtggacagctggacaccaagctggctgtcacacggggctggactccggcatcaggtgatacagtcctgggcatcttcttgggacaggaaactaccctcagtctccccgtttgggagtctcaccatccttctatgccatggcttgggtcctgcacctggtcccagtccactgtgtggccctaggcaagaccatttcttctctgggcattgcgggtcatttccagaagggactcccccatgattcctgatgaagcaagcaaggcaaggtgatggttcccaatgcagagatgcaaaaactgatgtctgtgggcctggggcagggctgggatcaccagtcagggcttgttccctccaggctggagtggggttcgggtggctcaggggtgggctgttttggctgagctccctgatgctcatttctaccccagcccacagatcctgtgggcagcggccagggcagccatggcttgggcaagtaggctgggcctgctgctggcactgctgctgcccgtggtcggtgcctccacgccaggcaccgtggtccgactcaacaaggcagcattgagctacggtaagcggtgtgttacccagtgagtgtctgtgagcctgtacatgcgtgtgcaatcctaagtgtgtgtgcgtagctgtgaactcaaaaggcccatgaggacccagattttaattggaagttgtgtccctggcacccagacagtgcctgacacatggcgctgctcaacaaatgcttattacataaatgcgtgaggggggagtacgtcatgtggccagtgtgcaagtgtgcacatgtgacttgctcacatgctttggtgatgtgggcataggtcggtttgaggggctatttttacctgtgtgtgtctacttatgagtttgaaatttcatagagctgtgcccacgtgtgtacttaagtgtcggggagggtgcaagcccatgatgctgcctggatgtgtgtgcacaggtacggctgttcaccctgggtgtacacgtttgcgtatgtggtgtgtgcacgcacgtgtgttcttgggagaggtctgtctagcaccgtgatgcaaggagtgttctaaagttatatcccttctgagctcagcgtgagagaaccatccgctctctgggtcccacttgtgcgagggctctgtcttacggctgtgctgctagatccttccaagtcttgccccaatcccctaaggagggcacaatgaagaaacttagccccagggagggacagacattgccaaggtccaggacgccagcacaaacatgtttattcacctcgagttgcctcccggtgagaatttggtttcccaccaaagccaggagatcagaagcggtttcccccaaggccaaactcagattacagtgtgagaaagtcaggtcagacagtagatgggaccttcagtggcccaggacatgaagcagtggctcagggaagtagcaggtttcccccacccctgggtaaacacagccttccgggacctcatatccgggctgatgggcaggcaatgaaaggggtcagtgatccgtgccagagcatgacatggagccattcatggatgcctgcaggtagggccatgaggcccgcgccctccgccgccttcctgccctctgcccatcctgtgcaagcctcctttgtccccagggagccctccccagcttgcctgcctgtgtttgtttttggcagaaatctggctggaggcccacgctggacgcattgctccccaggctgggctgagtggctacttccagtgtcctccccaccccatcctgcaagccccagagttcaaaccctgcgtcaagggagcactgtagatggagtctgaggtctgggtgtgagttccagctcagctgcagatggttaggtgggagaggggtgctgggaaacatggaaaccaccgcctttatgcttcttgttgggggagactaagaaccagagaggtgcagggactcctcaagttcccacagtgagtctgagcagtgggcaggcctcttgactcctcatttgaagctcccttccagcaccatcacctcttattctaattcaactcctgcttaattagcacctctctggggctcagcagcacaggtgagtgaggatgcccagaggctcgggagccaggtccctcggtccaaagccagctttccctggccaggtgccctcacctctctgtaaactgggcacgataacaggaaaagtaaagcactcagaacagggcctggcactacaggatcacaacataaacgattgccgctattattacaaaaataaatagcaatggtagaagctagcatttgctgtgcactgagtgtttacaatgatcctatgtgacagataccattagaatcattgcagatgtatagatggggaaactgaggcacagagtagccacacaggcagtgagtagcagtgagcactgcggtttgaaaccaggatctgagagactcttgagtcctcagcccccaggtgaggctgtcccctcccctcccaagggacgtcccctctgctcccatgggcgcctccacagcaggccagggatgactgggagatgccccttctgcttgggaacttagggaaggctcccagaggagatgggatctggttggaaccttgcaagagggcaaaggattttgttgcttttgaaggacggggtaaatcagcaggattttgagaggcagagtgggagaaggaggtcatgcccaggtggagagagcctgatgcgagtggtgcacccaaggtgggctcatggggagtcagctgccctccccatatgcttggagtaagcctaccccttccagtctgagtaccctctgcccaaggtgcagggtagatggcaggcagtgtgttcttgctacttggtggttcccgagggcaccctgacctcactctaccctggccccacagtgtctgaaattgggaaagcccctctccagcgggccctgcaggtcactgtccctcatttcctggactggagtggagaggcgcttcagcccaccaggtgagtgctcccctcctccagagaaggtgctcctgccaccaagtggagtgttcctgcttgccaggtgggtgcttcagtccaccgggcatgtgctcctgcctgctgggcagatgctcctatccacggggcaaagtgttccagtccaccagatgagcactctccactgaaggtgagtgctccctcccacaaggtgagtggtcacaagatgatttaagagagggacccaagatggagaagccgggcctggtgcctctgaattagtgaatttctgccctcaagggctaagagtggctcctgggtccccagggctggcaggaccctctgtttctagaaactggatactgaatttagacacgaatctgagcctcctttacctccaccctactctgcttaatgcagaaactaaaggcatagggatgtggagcatcccaaacttagacacccctgggctggtcaacagtcaccttccacataggaactagggctcactactgtcagatctttgggtttccaagagaagatatacatctagaatccatcaaatttggaatgatagcaactaatgaaaaaacatttaaagcccaggcgcagtggtccacgcctgtaatcccagcactttgggaggccgaggtgggtggatcacctgagatcaggagttcaagaccagcctggctaacatggtgaaaccccatctcaactaaaaatacaaaaattagctgggagtggtggcgtgtgcctgtaatcccagctactcaggaggctgaggtgggagaatctcttgaacctgggaggcagaggttgcagtgagccaagattgtgccattgtactccagcctggacgacaagaatgaaactctgtctcaaaacaaaaaaacaaaaacaaaaacaaacaaacaaacaaaaaatatttaagactttaagaccctggaacaatgggtggatggtgaaaaaaacatctggcttgggggccaccagtttgagatcccttaggaagagctgaaatgcagttcatggcatggttaataaaggtggagaactggacataaatacccagcgaccaaagatgcctaaatcacttgtggtctggccacacaatggacaccatggggctgtttgaaaacagtgcccggggctcttgtttgtagacacaggattgaacccaggattgttgagtgcacagacgcagcttctgtacggggacctgaactgtacagtgcagaaatgactttcatttaggaaataaaataaatcacaggttagctggagagtgcttggagctttgaagtgggggagcttctgttgctgtaggctacgagctgcagacattgactaggataccagagagaggatttctgccttctgtggttcctgaagtttttcttttccaaccttcccaactttccaggcaggggtcggaaactgtcaaaaacctgagcaatcatctcacccaagtcctgcccgaagcgggggcccctctgcatgttctccctaccagctggtgtccaaccttggtttgcatgccccgtggtgatggagaactcaccatcttccccttacctcatggttccaattgtcagaaagcccttctttataacatcgtgtgggtatggctcagagcacccaccccagagttgatcccatggtttaatgggggccactctgtcaccttgattactaccctgcaggatccggattctgaatgtccatgtgccccgcctccacctgaaattcattgctggtttcggagtgcgcctgctggcagcagctaattttactttcaaggtctttcggtgagcggatctccttgttagggggtgagaagggttttggggatgctccgagggatacagtgaggggacggggggtagcaactcctccagggccctcatccaggcctcttgactctctgtccagttgctctctctcccctcacgcttggaggggagcaagatagtgagaacatttctgagaaccctgctcaacagctctgcaactgggcagagtcacttggcttgtttaccccctcagcttcctcatctgtaaaatgggatgaacttctgtaaagtgccaatgacggtttggtgaatgggttcattgctgtgattataatgactgtcctctctttcccagggcaaggcacatgagagacgctcaataagcataacgatcagagttatttttgtgtgcctggcatcttgtatgttactgcatttaattttcacaccatgagctgtgcagtcagaggggtctcttatctagcttctctaccctgacactatgattttatgattgcttcctgtgggccaggctctgtgctgggtgttttcacatgattatctcacaggaaactcagcacagccctgcgaaataggtcccaccaaccttatgtccattttacagaagaggaaactgaggctcagcatggtaaatgactggcccagggtctcacagtgagaggctccggacagccagtgctcacacccactgctgcaacgtctatgaccccaagtggagtcttgaggctgggggctgtgggcctgccccaggtagggccatctcactctgggagtggggggcctgcctgggccaagtggagggcaggcaggggctggggaatttgtaagatctatcatcagtcatggtgggctctgctgggcggtgctgctcgggctcaggactggcatccctacagcgccccagagcccctggagctgacgctgcctgtggaactgctggctgacacccgcgtgacccagagctccatcaggacccctgtggtcagcatctctgcctgctctttattctcgggccacgccaacgagtttgatggcagtaacaggtgggtgcctggtgagggcagggtcacaggaatcccagatgccaaagctgtgctgctgtttcctgagctgcccactcaggactttaaccaatggccacaagggcctcaggggcccccattattgtgcttgttttatgtcggaggacactgaggctcagagagggggagaggcatgcctgaggtcacacagcaagtgagcggccagagcctgggacctttccatcccctgcaccacttgacaatacacactagctattagcacactctttggggagggattttgggtggatcagactggctgtgaggacctcggagacccacccctcctagcagagatgagggaaaggaagccagggagggcctgggacccaccaatagccagctctcgcaggccaggccgctcccttctgcataaaggctgatggcagctcccgcctccagagcacttatgtgtgctgagcattgttcaggccctttccatagatcatttcgtttgatcctcacagtatcctaccaggtaggtgttaagtatttcctgcattttacaggagcgcaaatggaggcccagagcagttaagtgacttgcctaaggccaccggctgacaaatggtgtaaccacattcaggcccaggcagcccgactaatcccatggcttgcaaatccccctagacgatgtctgcaccttcccaatgtgagcggggcttgctgaggtgttgagcatcttggaggcttagaagaatgcaacgtatgcatcaagactgagctttctccccagagagggatgtggctgcgtaaacccattcacacttgtgtcgcatgatcaccacgtgtgactcacgacccctcactgtccttacaggcaggggatgctcacagcttattgaaggggaaatggaagcccagaggctttgggaacacagaggccaccctcccacctcccccccagggagctggttcagcaaggttgggctgtggcttggatcgacatttttgcaaatcaaggaactataggtgcctatggagcactgttgagttgtttagaggggaaacggaggcccagagtcaggaagggattttattaggtgtgtcacagaaaattggacccaaagcatgaagcagacccaggatcccagctctaccccctaacccaacctttactgggcttagagtggccacgaagccagctggccaaggtcatggccaagtctggcttttgcaacgccctctctgtctcacgcgccacattcttggccatttccaaaccttgagataaatgaccctctcttttgagactcaatttcctcatctatggggccagttatgccagcactgtgtctggcagatggcagggcatcgaatggaattgattggcctcctggctgaggatagagacttctcttcccagacgtgcgactgtgctgagtgacgggacttaatatgtttgggagcccaggaactctttctgtgtttctccctcagcacctcccacgcgctgctggtcctggtgcagaagcacattaaagctgtcttgagtaacaaggtaaagggcttgcagatttctcagaaaggagggcatggcttcaccgagaaggcacagtgaagaaagagtgggatttcaggcagggggtactttgcttgggattaaaaaaaaaaaaaagacgccccttcatggtccccatgaaggcagggaaaaggctggtgccaggtccaggggagtgatggggaggcacaaatgagggcagagtttatggggttggaggggagggggaggttcatcctcttagggcagccccaatttcatgctagagggtggatggagtggggttcatgggcctgtggtttgtgaaaagaagacagaacgagagtgaacgagggtgtgggcatggggccacctgtggcctggacgggtcctggtcctttccagatgtgcagtctctgctcctggttccacatctgtactgaaagagacaaagcccctcctccgtggggtggttgcaggcatgaaatgcattaacatttcagaagagttcgggacagtggttggcagagtgggtgctgctattattattactattttagctcttgtcattgtctgcgtggagctgacttggtgagagagggtagcccaggggctagggtcccactgcccagggggagctcattttctctctgccctatcccatcccaaccccactactgctttaaggggcagtagtagagacgaagtcaacctcctgcatgccaccccacaccccccagagggcgactgcaacatgcccaccttacagatgagaaaaccgaggctcgaggggtgaaggtggggcagctcctcttgagagtcctgcgggatgcccaagtggacagcttaactttgtctgttggtccagcctcttcctctccctgtagtccccctgctgccctcatagccagcctcttctgggcaaggggcttcaggcagcactgcaggaaggaagacccaccctctcctcttcctctcgacctcgccctgcccagtctcgccagctcttgcctggttaaggctgcgagtgcccctggccttgcagttcctcctctgcccccatcttctatcacactgatcccaacataatgtacttctctggctgcccatggtgcccagggaaaacctctgtagctccctggcctggcatctgaagcttggcctggtctggcttgctgatcactgcctgcctctgcatgggcaccaccctctcaccagctgagcttcaagactgagctctcagccccgttgcagcagattccctgcctccgttgctcaggcccagctacgaccacctgggctgggctccacggcctctgttctttcttccgtgcctggggacctatgctcacactgccatcagcctttgggttgcttctcctctgtttcttcggtgcctggaaggggtcccaggagatgcccactggcgggtggaggaagggattccaggcatggtgtatgggttggggaggcttctagacagggactctagacccctctcagccttgtgccctccagccccagggctgccctaaccccagcctccttctctctgtcttaccacagctgtgcctgagcatctccaacctggtgcagggtgtcaatgtccacctgggcaccttaattggtaagatctgggagccaggggagggggctggggcctctgggaccccctggagcccctagaaccctccaaaggctccactctggatcacggtcgacctctaggagagtcagttgtagggtgactgaattgtgagctcccaaaacagtgtaattattcatgaaatctgggaatctccaaattctagaaccaaaaccaagtctttgattctagaatctgtgtatcttagatcaaaaaatctgaaaaacaaaatacaattttgaaatcatgagtcttaacattggagaatccaaggaccattgacacttagaatctggaatcattctagaatctagactcatcattccaaagaccagctcttgcctcggcctcccaaagtgctgggatcacaggcatgagccaccacccctggcctcgccctttgaaacttccctgcaagagtattctgaggctcagaggagttgggctctgagccatgcctccctgaaggctgctcggagggtctgttagggaagctggacttctgtgatcttgcataactggccccagtggtgtgtgctcttggagttctcataggagacagtgtgatgaggtgggaagagcatagctttggggtcagactgaccaggtattacaatcctgggcaagactgaacctcaccagactgcgtgtgcgtgtgtgcgtacgtgtgagtgtgcatgtgtgcatacgtgtgtataaaataaccctacaggattgtaacgaggattgaatgagatgctgtaagtcaagcatctggaccttgataagtgagagttctcttctttttctgtggttgcttctcacctttgtcaggggatatttgtgcctggactgggcccttctccttccttctaacttggggtcactagtctcccaccaagggggaaagcagaaagcatacctgttagaattgtgcctaaactaagagtcagcaggctgtgagtagctcaatcctggccatgtgcactttgccacttaaatttgcttattcagaggcttgctctgcctcttttgtttcgtggcctggctctggctaatcagggtaatcagacaataaataaacttttctggatagatgaaacgttggtgagcagtgctaaatatgccatcttttcttctctaccctggtttcatgaaggcctcaaccccgtgggtcctgagtcccagatccgctattccatggtcagtgtgcccactgtcaccagtgactacatttccctggaagtcaatgtaagtgcctcctggccagcccagagctgggggcttgctgcctctggagtccttggtgttccagaagattcctaaaggagcgggggagtgggaaaggagaggaggagctggaatagtgtcccagccgggagcatgccacacaggcgaaagtgtgaactacacatgtggcatcttgcaggggctggggggcagggagtggcatctaggagtccaggttctgccatggagccacctccgtgctgaggccctgctgcttttctcccacttccccctcccacccctacaggctgttctcttcctgctgggcaagcccatcatcctgcccacggatgccaccccttttgtgttgccaaggcatgtgggtaccgagggctccatggccaccgtgggcctctcccagcagctgtttgactctgcgctcctgctgctgcagaaggccggtgccctcaacctggacatcacagggcagctggtgagggcccgacctgcagcccagggcctgtggggcaagagctccctgtggcccagcctagggagacctcccagaggccaaatcatgggtgggtggggccgctgaagctggcgccacagggtggctgttggaagggttaaacgggggctatggggagcgattgctcagggggaaagtggtgatctgtcttggggagcagctgtcctaaaacctgttgtggcctggggtgctgatttcagaggtcggatgacaacctgctgaacacctctgctctgggccggctcatcccggaggtcggtgatgtttctgatcattccagggactgagacaagggactggggtgggggttctctgggtcatgggatctctgctggctcttatctgtcccaagtgaagttcagcatctgtccttaaacctactcctccatcttggggaggctctaacttctgcccagacatcacactctgtctctctgtgcctttgcttgagcagtgtctgctgtttggaatgtctttctcctccctttcccttatccttcttcaagaccaagctcaaggtcacctcctcggggagatccaaccccctcgtcttgtccagcggcctgtaagacccactggcttacacagaggggggacccacctctgtgcccagtcacatacagcgccatggtggcccaatcagcatttgaggagtgactgaccagagagcccgccagccgctgcctcagcagggcctcctccgcctctgcctccccaggtggcccgccagtttcccgagcccatgcctgtggtgctcaaggtgcggctgggtgccacacctgtggccatgctccacacaaacaacgccaccctgcggctgcagcccttcgtggaggtcctggccacagcctccaactcggctttccagtccctcttctccctggatgtggtgagtgcggtggggctggtcggaaggcaggcaactgtcacagagacctccctccctgcttcactgtcccctcatctttgctctactcacactattgtcttcgctgttccttgaatgtgtcaggacactcccgccccaggacctttgcatgtgctgagccctcggcctaggactctcccaccctggctcttggcatggccagctccccctcctcttccaggcctcagcttaaatgttgcagccttcctggtctaccctgagtaagaaggtccccatcagccttctcggcacctcctctctgcatttgtggcccctgccactctctgaaaggatggcgcctggttactgtggttacggtccccctctcccacagctggcggctcgttcccagggcagggagctggtctgccttgttcacactgtgttgttgccaacattcagcgtggggcctggcacatagcaggggctccacagacacctgctgcctgaatgagtcgggggatgggtgggaggctgggtggctggtgcccccctcatggctctgtgccctctgaccctgctctccccatgtgcccaggtagtgaacttgagactccagctctctgtgtccaaggtgaagcttcaggggaccacgtctgtgctggggtaaacgagcccacctggacccagcagcctcagtgtgttcttctgtgccatgggtccatcaccaccctgggtcacggtgttagccagggagcctgggcgtagggaggtgccagaccctgtcctgaattctcctgcttctctttcagggatgtccagctcacggtggcctcctccaacgtgggcttcattgatgtgagtgtggggctggggcctctagaaacccccgtcctgggtagggcacaccttgagcctggggaagagatggctgtgtacatgtgctgacccgtgtgcctgtgtgtgccactatagtcaggcttccccgggctgcttggggacagtggccagtcagtccatctgcctgatactctgcctggcagtcgatgacttgtcacccagccctcaccccaaaagtccattggtcagttggacaaagaatgtcagctgtcccttcagccaggtgatgtgattgggtcatcggccaccatacatccacttgtcagccggcatgccatcaacatgccccccttctacccagccgtcagtctgtctgtctgtcggtcatctgcgtcaggcagtctgctggccagtccacctgttggtcacacagtgcgtgagtgtccacagtcagtgcctgtccctcagcctccactccggtgagcactgctgctgggtgtgatcctgcgaaggctgagccaaccatgggggtatttctgggccccacttgaacccaggacatgggtgatctgccttcctccctgtgcctcagcctctgccatccatctgttgtctgtctgtctctgtgtatatttatgtatgtgcctgactgtccatctctcctggcccctcggctgggacgggcccatctccctggctccgtggccacagacagatcaggtgcgcacactgatgggcaccgtttttgagaagcccctgctggaccatctcaatggtaagccctgccctccaccccagcagggcccctctggccccctccatatcccacatctgctcggtgctcaatcccagcccccttcccacctcccaggctcacagggtgagagggggcctctggagtctagcagcccatgtgtgcatgccccttggcacatatctgtgtagcagctgtgtgatcttcaccaagcagctgtgtgatcttcaccaagttcctttttctctctgagccccagcttccccttctgtaaaaggggtataacaataatggcatccatcttccagatgcctgcgaggactcagtgctgtgatgcacatgagggcttcagcacaggctggctccaggggacgatcctttcttctttctcgcctgcagctctcttggccatgggaattgccctccctggtgtggtcaacctccactatgtcgcccctgagatctttgtctatgaggtgagagcctttgggtgtgaccagaggggcctccttcactcagagggactgattgaggtgggggtcacctctctccctccccctctgtggctgccaaaaccatgccatgaatccttaactgcaatgaaatgaaaagtccaggatgccaagagatgctgggtcaaaggtttcacccttcctttagtcctcataaaatatcacaccagaccacactcggacaattggggccttcacttgtcccgtgatcctgtgccctggaatgggcacaacccctttgatatctggagcagatgacagtgggactccttccactttgtagacaaactgtgcaggctggatgggagtagggaacttcctgaactttctaaaattgctttccctggacctgaaattgtgggcccagggtgagcttcagtcacaacactgcccagggtgagatgcgacagctgctttcttctgtacctgggatataaaaggaaattcagtcagcaagacatgcctaggacagaaagctgaacccaggtctctcaagcccaatgtctcacgtgctgttcatacccgatgagtgtgacctgctgatgtaattccagggaggatgcccttgttccttaagaactactctctcaaggcacttgggtgattatccgcccccatgagaaggaacgattggtacacagaggagcagggctctgtggggatttccctaggacttcccaaaacaggcagttagtggctgacccaccttggcacttgacccagccactgggtcagaggtgaaaagtccctagtccagtactgttaccaatggaactttctgcaaggatggaaatttatactgtccaaagcagcagccatgataagccacaggtacatgtggctactgagcactgaaatgtggctagtgcaactgtggacctgaattttttattttgtttcattttaatgaatttccatgtaattagccataggactaattaattagccatagccactaattgtggctgccttattggaccacagagccctaggctacgagctacactggggcaggaactgggtctggcttgttctctgctggctccccagcacctgccacagggcttggcttatagtagaggcttgatgaagatttactgaatgaatgaatgaatgatcggcagccctccagaatgctcctgcagtggagtgtagcataggggagctatggggggtgcctgagtctgctggagagagttggacttggagaagatgctccatggttctgggctcccattcataaagcatcagtggtatccaccatcggagcagcaaccagtgccttccatgggggtctcactgcatcctcacagtgaccttgtgaggtggaggctgttactacccccaaagtgacagactggtaaactgaggcccagagaggcaaaggactctcctcacaacccacagcaagaatggcagagcagaactcagagccaggctgagggggcggctggggtcctgcctgtgcctcctctgacctggtccatggtttcctttgcccttcagggctacgtggtgatatccagtggactcttctaccagagctgaggcaagaccactgggaggcctgagagtgggccagctcgctgctcaggcgaatttctcatttcaagccactggggaaactgaggcaaaaccatacttagtcatcaccaacaagctggactgcttagctgggctgttttatcttccctgagtgcctgggtctccctccctcacttctgccctttcccttcctcctcctcttctcctccctcttccctcatctcccccctccttcctctgccccaccccagcggggagcagactgctcctccaggctgtatagacctgccctcttgcattaaacaacttctcttgagctgcaactttcagccaagcccagcaacctctttgcatacctaaggccagttccctacatgcagtctccaggttctgtctgtccctggagccaccaacgctgcctgggagaagaagaagacataaccacatctctgttgatgacatctctgttgatgacatccattgactgtgtcacctctttgcctgggggagctcctgttttgaaagaggaccctggagagccgcatggatgagcctgaagttagagcaccatggtggcactttgggcacagtgccccttgcctggcagcttgccccgtcttgtaactagaacctcataggagccccatgaatcaggcaggcagagactggagttccattttatggatgtggggactaaggtccactgaggaggggaatgcacggtgcctcagagctggatggtgacatgaccttccttcaatccagacatgagatgtctggttccctctgccattctccggctcccagagctggaccttgtccctgagtcatgaacttcaggtgatggggagttcattgctcttctaggcagcttctccatctttggtttctctgcctttggttttacgagcaagttttttgttctaaggaggcagcatctgcttcctgggcctctgcccttctggtcacactgaacatgtctaacccctttagcctctgaatgcccttcacacccagtgaatcacacagaacaagatgacctagggaacaccaagggatgtaaatgctggcaagtcaaagccatgtgattttctacccctgataagctaatctcttagccagagataggattccttcctgcctagatatatggtgtttatgttctgtttatgtttcctttggggagtaaaaggtgcctcaatttttaccaccagtaagcaaagcctttggcacggtgtgaccctagccactcttcctgtgagggttcaggttcattcctaaagtttccagcatgagagatcgaaggtactggaccaagcccagagtcttggtggtggagaacaggttgggggtggtactgagagagtggcaaggggcaggttggaaaatccacccccatgattttgctcaggacaatgtgactcgtatttcatttggttatttggttaattaattcactcatcctacttttattgagggttaaaataggctgagctctagaagtgagggagggagacccaggcactcagagtggtctgcagtatgagagagacaaaaaacttaagacagagccatagtccataaaggaagttaataacctaggaaaagattatgagctcaatatgtcagtccagtgatccatctatctatccatccatccatctatccatccatccatccatccacccacccaccaatcaatctatgtaaccatccatccatttatcgatcatccatccatccacccatgcatccacctactcactacccatcaatccatataaccatccatacatttgttcatccatccatccatccacccacccatcaatccgtataaccatccatccatttgtccatcatccattcatccatccatctactcactacccatcaatccatataaccattcatccatttgttcatcatccatccattcacccatgcatccacctacgcactaccgatcaatccatataaccatccatccattcgttcatccatccatccatccacccacccatcaatccatataaccatccatccatttgtcgtccatcatccattcattcatccatccatctactcactatccatcaatccatataactattcatccatttgttcatcatccatccatccatccatgcatccacctactcactactgatcaatccatataaccatccatccatttgttcatctatccattcatccacccacccatcaatccatataaccatccatccatttgtccatcatccatccatccatctactcactacccatcaattcatataaccattcatccatttgttcatcatccatccatccatccatccatccgtccgtccgtccgtccatccatccatccgtctgcccatttattcagtcattttttccaaccagccaggctttgtttgtacccatgatgtacctatttcaataatatatgttcttttaggtgaaggggggatgaaaatgcctcagtcaagctccttgcccagaaggaagatggtggtctgtccaaagagagttgccctcatcctaagggacaccctttggtcattcagttaggtgcctgctgggctctggctgctgagagggacagatgggtgtagcagtttgagtccagttagaagatagaaaccacacaggagctcaaacaggggaagtttaatatgaagagttattaactatgataaaagagtcactgcaagacataaggaaactctatatggtcctctagggctgagggagagtacccaaggaaagacaaactcggaagggcttcaggcgttattggagaaggcattgctcagcctagtggatagcacagatgttggctggtgtggccaggttggagatggcctcagctggcctagagttgctagagttgctgggcaaacaacaggaaactaagaccttgggatccagtgtgcaagcagcatggggtgacgaaagaggggagctctggggtgtggcttgcacatggagcagctcagggtgtggctttctggactacaggcgactggatagaggtaacgtggggctacttatggaggagtctgggcactggcatgggcaagaggccttcagaggggttgggccagatgggtgggggcatggagagtagttctgatttctgtttggaagggctggccccaggctgaggttgcaagtttgcagagggattgagttctggacccatggctgggataggcttcacctgcacacactcacacagccaactccaacccacattggaaactgcaggaagcctcttcctcttgtactgccctctcctaagaaaggttgacatcatgctcactttaaaggagaaatacttaagtgagtcccattgcttatcatggaacatacactgaagggtgcttttggagctgagaggcagtaataaattgctaactgacacagtggggcagaggagaaaaggaccgtgttttcccaggtcaggtgcctttgcaaatctctcacttgtccacttgcatggccactctttgccctgaatgtctaccctgcatatttcctcgctaggctctttgcccaacatgggatgtctttaccggagcctgtctaccccaacgcagcagctcagatgcagtctcccctggccacagcatggggtgacctacctgcctggtttcagtctccaaacccctcctcctcaatcactgtgttgccctttgattgcacaccatggttattggtgtccatgacttccttccccaccgcacctccctgacccttcccagagcccagagtacaacaaatgcataataaatgtgtggtgagcgagctgtttgcacacatacatggtggagctctggcccaggcttgcctcaaccctaagccctgggcaggccatgtggaaagccccatcctcataggcaggtgggggctgctagacttggagtcccctgtgttgggtccccagagggtcagtggggaagggaaaagatgacactgagcttcaggactggcccagtctctagcgtctgagagttagagaggaaaggaggctagggaaggctccctggaggaaggagcctcagctcgtcctggaagcatggctgaatttagagctggggtagggagggcatcataaggagccaggcagggcgattctggggcccggaggaagagaggagccctgttgagtatgccttggcaggtgttggcctgggctctggagcccttggatccacattcaacccctagctgtgccattcacttgctgtatgaccttgggcaaatgactcaacctctctgagccttagtttctctagctataaaatggggaaaattgctgaagtgcctgcctcatagggtagttctgaggattaaatgggtaagtgtaaataaacacttagcgtgatgcctggtacagggggaatgcacagtaaatgggtcctactgttattgtcagcagcatagagttctaccctctcatccatcataaagaggattaaacagaagtggcccagagaggttgagggagctgcccaaggccacacagcttgtgagggaagtggctgggactggtgttcaggtccctaaacccattcaaggggcttctcctctttcacccaccccatgtcctttctgctctccaccccaaatatgctctgccctggtgggaggcagggagagccaggcaactgcagtcaaggtgcactggggtggatttgtgggtggtgagagaggatgcaaggcctgcctctctgttgggggcaggtcagcagggataagacgatgctatctgtggatctggctcctgcacctcagggcctggatcagagtagagactatctggccaccctgggtcctgctcttgctctttccagcctggcttcagccgcggcatgtgacctcgggcaggccctcactcccctctggcctcagtggccccagatgcacacgagcacagtggcttcctccatcttcctggacgtgtggagtccgtgtggggtgggaaaggaaaaccccaggcccccagcagcctcccggggactgttcctcaagcacaaaatccctcaaggggcctctgagccaagcctccccaagaagctcatgatgggcagaacagaggctggaaaccccaaggcccggtcccaggtctgtggccggctccctctgtgcctctgaagtcacctccgccttcatttctcccagatttggaccttgagagaaagcacccctccacctggtactgcatggtagcatcttcagggggtccctttgaagacaccttacttggccattagctccttgtgtcccctgtgaatgaaccttgggggacacaagccccagtgggcttagccagcatctcctaagccttgtgcacttgctggcccctgcctgaaacaccttgcccctgtattgcagagctggttttgctcaccccctggcatcagctccaacaacccttgctcacaggtctccaggttctgatgatcaccctgttctttcatctctgtcccatctctctggtttagtggctctcatcacccttgcctccctcgagaacgataggctttgtggttgttgacctgcacagtgcccgtctccccctttggcctccaagatctctctcagggcaggaatcccaactgcctgttcactgcacaggcgtggcacacagtaggtgctcaataaatgtttcttgaagaaacaaatgcatgtcctctgtgtgcccagacttgtgggaggtgctgggtctaggaaaagggacagtgtgagcactgatggtcccttgggcagccacatcctgcccctggtacccgccctcatgtggccaccaggattcccagccactcttgtcttccatactatttacattggaacagactgaaacgtcacgtgagcaatagggctcctgttcttcaagcctctagataattatctgggccttattaagcccttaattattccaagccactaatcaggctcccgaatataagggcttcttcagctcagggtcacgaggcaggggtcagtcatctgcagaacttccctaagctcagcaaggtaaggacagtcccccaactgtggaattctccccagagagtgtcttttccagctttgtcattttacagatgagaaaactgaggcccagagaggggaagagacttgcctgaggtcacacagtaaatgggtggcagggccagggcttggatctatgtcctgacccccatccagtgcttcccacctcacaggtgatcactaggcattgcaattttccgatgctgtaggagtaaggaaagatcaaggagacagcagatccaatgggtctccttggtctccatctgaggttgaagggagactagggagggaaaccccaggctctgctttgtaagagctcagagccaagctggggcacccaggagtgggagtatgtgccaggcagaaagagggaggaagggacttctggtgggggaaaccatgagcaaaggatgggggtggttgggggtagcaggaaacactcatcacaggtagggtggattatttgcacggtcaggttcaatttgtgatttttgaggctcagggcagtcgggggttgaggaaggcttcctggtagatgaggcaagtgctgaaattaggacttgagggttgagtcagtgatagatggatggagggaaggcattctaaaagggaggggcagcttaggacaagcacattcagaaacaaaaccctagcattagccatttgtcccagagacacccgcatgaccacgttacctgaagccacttattattctgaaagggcaaaaaaagaccctgccctgagtgaccctaacacctggcatcagttctggcctggggacgggagactggggtgaggctcagtcaccccgtctgtgagatggggctggggctggaggagaccttcaccaagcccctcccagctctgttgcctggctcagaatttcacagcccctttggggatgatttttaaagagatttgacatggggtgtgccgggacatgagcacacgtcatggcacgcacctgtgcattcacagtggtcgagaagcgctactgtggattattttaagcccagatatatcttccatttagtgaatattgactattggcttgaacacttctcgatacttaagctccttttcatccctcaggtctcagcctaaatgtttcctccataaggagtccgtccctgacccctttatcccatatcccaccctattgcttctcgttccctgccagactttaggatttaggaggagcagggctgtctctgccaccgagataaaagagacaagcccggtctgcttggcacagagaagacacccaatagatgtgagccgaatgaatgaatgagtgaatgagtgaatgaatgcaggcattggcttggactgggaaggcaggcccatggtaagggcccatcttagtttgtgcattaggtgagccctcagtgacttagcccgctgagagcaagagagagtctggtgggaacctcctctctctgggtggacataggccctgctcccatgggccctgccttcattcttttcagccaaagctcaaaactgaaatatacacttggcccttggttggaagagtttcagatcttggtaagtaagagggaaggatttctatgggcccggggtggggtagggctttcctgggaacctgaaaaggtctggggtgggaggtccttatgctaggagacctaatgtctgtgcctcagtttctctatcggagaggcgatgtctcaagaggcctttcagggctcagagttgagctttctgagttccacatggaagtgagctgagctggaagaggtggggagggaccctggctgtagggtcaaggtggggacacagggctccccactcccacaatgccgtgtggggctcaaggaaagtctggaactctctctgtggctccagcattcagccgtccttgaacccatgaaaaactgcagttgaaccttcctccaaccccatcttgcaggctggtcagaacacaccatgtccatggggaaactgaggcttacagagggaaatgagctagctgggggtggctggaggccctgtgtttaatctgggggttcctcaatcccttggaagagggcagtgctcatgtttgctgaactggctggagtctaaaggctcttggaccccagaaacacccagggggctcaatctgctctgagacagaaggtccccaaggggaccagggtctggtgggctgcgcccaattcaggccccttggcacaggtggtgccatgctgcggatcctgtgcctggcactctgcagcctgctgactggcacgcgagctgaccctggggcactgctgcggttgggcatggacatcatgaaccgtggtgagcttgtgggcccgggcgtgcagctgggaggcggtgcttggggtaggtggtaggtagtcactgctcttggttgcacatcctggagcatcccgtgagctccaagtaaacttataagcaagtgttattattattctcccactttacagaggggagaaaccaaggaccagagaaaatgggatgattttcccatgctccccctgcaagttagaggcagagctgaaaatcctgctcctttggagtctctccttggccctgatggcaggggttttagccacaagtgggctgtgggagtgacagacaagggtcaaatcccagcaacaacttgctgtgtgacctcaggcaagttacttggcctccctgtgttgctgtttgctcatctgtaaaggtgaaatgtaaagaaatgtaaaatagggtgaccagtctgtccctagcaggatagaataatctcttggaggagaccttagtaaaatgtgttttccacctccatcccccactccactagcacaagggaaaccgagtcacatccaggtacaaaaggctaatgactgttctaccagctcagtgtttgtgccctctctggaattagcttgtgaccataatggaggtgtttctggcggggtgttacttggggttgggtcctccaggtttggggaatcagaatttctctgcttcaggcccaaagtctgcattcaagtccccagaggagtcccctaatcacctaggcttgggagtggctggtccacaggataaagtcagtaccctagggttcaagagcttcactacatgccccctgcaaactgctccagtttctctgtcgtgtctgtcctcaccctccagccatgctgaatctatcctcttcccccaactgtgccaccttctctcccacccacctttgcacttgctgtgccctctgtccagactgatatcttttatccctttgcttcctgctgaaaattactattcccctttcaagtaccaactgatctgtcacctcctcctggaagccttccccagctcttctcttcctacctaaaccctcgtgcggctcctacagcttgttactgtcattgctggtgactccatcttcccccattaggctggggcgctgtgggactcatctctgggtctctgccatcgtccagcccagggtggggcacagtgacggtgagtggcctgggatacctgagtgattggcccagggaaaatctctccaactaagtgtctccactccagaggtccagagcgccatggatgagagtcatatcctggagaagatggcagccgaggcaggcaagaaacagccagggatgaaacctatcaagggcatcaccaagtgagtaggggaggggagctggagggtggtggttagggcagagggtggtggggattgctgtgcccaagatcttagcaggccaggtaatggagctggtgagggatgtggggtctcttccctgccttgtgctgtcttgctgtgtggccttgggtaggtcactgctcctgcctgtgcctggacctcctcagccattcactggggacaatttctgctttgtagtgagcagggtcattttgaggaggaaatgaggttggaaagtcaaatttcaactctgcatgcaacatgaactcattgaatgtacgtgaaattaaatgaaaacatcctcaaatggtagagctggaaaggcatcaacaatcatctaatgacaagaggaaactggttcctctgccagtgccacatgagattgatcagtaggggctgcctgaaacgatgcacttgggagggctctgaggcactgtctgcactcggcaggaactaggactgtgatcaactagcaatgtctgccaagagctcaggatgggcaagtgggggtatgtgtgccacatcttttgttaccctggatctcaactggtgattctcaaacaggggtgattttgcctccaagaagacatttggcaatgtccagggacatttttcattgtcacaagttgcggggactgggggaatgctactggcatctactgggctgaggtcggagatgctattagacatccaataatgcacaaatcagcctcatgacaaagaattatcctgcccaaaatgtggatagtgccacttttgagaaaccctgatctaagcaagcctcccattttgttgatggggaaattgtggcccacataaggaaatgacacagcccaaggtcacacagagtcagccatgtgtcccacctcccatataatgagtgctttctatatacaaattgattcatgtccagccttttgttttgcatttcataatggccccatgaatcatgcttacccccatgacatgggataggaggccggggttatcgaaagtcttcccagtaaagtggtgaagtgggtggaggtcctgggtcttgcctgctcagatcttattggtgtggctgcctgtcccttcccagtttgaaggtgaaggatgtccagctgcccgtcatcacactgaactttgtacctggagtgggcatcttccaatgtgtgtccacaggcatgaccgtcactggcaagaggtgagtgtggcaggggaggggcagcggggaggagaacggccttcctgtctcatccttacatgcacatatattgagtgcctactgtgtaccatctgagtgttgtaatctgggatgatgtagacttggtccctacctttgtcaggaaccagacctaagcacaatcacagactgagtgactggtctaggacagaggaagcattgaacagtggtggcggatggtcagaaaaggttatggggaggcaatgacagcaaagcagattttaaagggtgtgtaggggttcaccaaaacaaggagggagggagaaaagctggttgtgtcacctggggcaggtcccatccccttttctgtcttgtaggggtggtctcctaccctttctccctctcagctgctcagattgtgagcaaagagaaggcagggagagcggacaccatggcagagatgcccatggtgccctcctgctctgtcctccagcttcatgggagggaacatggagatcatcgtggccctgaacatcacagccaccaaccggcttctgcgggatgaggagacaggcctccccgtgttcaagagtgagggctgtgaggtcatcctggtcaatgtgaagactaacctgcctagcaagtgaggggctctgtggctggggaggaaggccggtccatattgctataccccccagcatatcacttcctgagccatggaacccccttaaccatgccccttcatgtcctgtgcctaaattcctgcactggtgcacctgcccacctatcctcggtgcctgtgtccatctagcatgctccccaagatggtcaacaagttcctggacagcaccctgcacaaagtcctccctgggctggtgagtgacccagagaaagcctccacccctcgttgctgggactgcttaggccagggctggcaaatgcatttcatgttgggtgctgaccctgattgactgatagtggctgggaagggttctgagactgtggctggctcagtggaagaaagtgccacaatcatctagtgatgtctgccatgaacagaggaggagaaaatgacagcctgcatgcacagcttgccaaccgtgctttgatgtccagtcccagggaaagagtcccggctaatttttgcagactttgatttggtcaacagatctggactctagtccgagctctgccatttactttctgtgggacttgggacctcagttttctccccagtccctgtcccaccagggctcttgggatggcccgtggtgtaccattcagctgtgtggaggctctccatgcagggaccctctcagcccagtgccttctctgcttccagatgtgtcccgccatcgatgcagtcctggtgtatgtgaacaggaagtggaccaacctcagtggtgagtgtagccctacccacaccttgcccctacctagggatatcaggatagatagactttgatgtcccattccccatcctagtgcctgcttccagcccagccttgggactagaggaggcttgaggtcatgatgttcatccccccactgtcccgatgggaggcctgaagtccccagggaatctgggttccttttctctcatctccctattcaatactgcatcctgaaccccacaagactccaaagacagcagcccttctttgctcgtccacaagcctcgtgcctatgtagtaatcccgatggtagtaatgcctgaatcgcctttgctgaggggatatactgcctccatcattttggggtcccattttgggtcccaaagcaggagagaggaaacctcagtgactggaactgaagaaaactcattcatgtccccagcagtgtggaatgggaaaagtcacttcactcttctcagcctcggtttgcttagctgtgaaatagagctgataatcctgaccatgccagtctgttgcaaggtccaagcagtgatggcctttggtgaactctcaagctctgtgctggctgagtgatgtgattttccaggccaggaaccatggcctctattctacagatgaagttacagaggcccagaagtgctaaggaatttgccttgagtcacgtggagggccaggtgcaggtagcagctggctggtgccagcttctctgggctgttcctggggttggtgcctctttgagtggaacctccttttcacacagaccccatgcctgtgggccagatgggcaccgtcaaatatgttctgatgtccgcaccagccaccacagccagctacatccaactggacttcagtgtaagcgcctagggccacctgggagctggggtctcaggctcactggtctgggtagtgggtgatgcttctgccaggacaggtggctggactagggctgtggagggagggaggcccctcaagccgtggaggccaatgccatgtgggtgtttgtggaccctgggcctctccctctttctgctctaaacgcgaaccttcagtgccccagctggcttctggggctgctgacttcacactcatgatccccgctaggctgtttgcttctcctagtgagtgaagcaaatattgtccccagtgaatggctgaggaggtccaggcacaggcaggagcagtgacctacccaaggccacacagcaagacagcacaaggcagggaagagaccccacatccctcaccagctccattacctggcctcctgagatctttggcacagcattccccaccactctcacctcaccctcacccagttgtatcctgccattttgcggatgggaacattgagaccttgggggagggtagggctgggctagggtcctgcagtgagttggtgtcagagttgggccctcacccagatctccagagctccaggcgaagaggtgagatgcatctttcaggaacgtgaagtaaaatggcaagatgtcaccccgctgtgaagtcttcctccagcaggattcttacacgccccgtgtcgatttccgcctgtctctttctcttgagaacaaggcagaaatcatgttccgaataaatgaagcctccaaccactcagagcaactgaggctactaaagcagtgctaggagaaagtgcccgtggtttagtgactgactcccttatcctcccaggcctcagtctacccacctgtacactgggaggtttggcccactgtagcccattgtggttctcttaataagatttaatgatttgctgactttgggtttggctggagccccatttgcttggaggactgagacactcctggccaacatccctctcggccaaggctgagtgtctccctcctgctgccccatagcctgtggtgcagcagcaaaagggcaaaaccatcaagcttgctgatgccggggaggccctcacgttccctgagggttatgccaaaggctcgtcgcagctgctgctcccagccaccttcctctctgcagagcttgcccttctgcagaagtcctttcatgtgaatatccaggatacaatggtgagctgtccagttccccatttccatctgcctctgtccattacaatgcagtccctgcctagtttttctatcatgaaaattatcctggccttgtgggcaacactaggactggaagatgcaggaccgatttgagtttctctcagcagttcatctcactatccaccatccctctgtccatgtaactaccatctactcatctgtacatccatcagtccgtacaaccaacaatttatcaacctacatctctaatgtcttggtcatccatccaccttccttttgtccaagcaacacccacccactcatctttctagctgtcatgtattcatcataccctaggttctatccttccaactagcatccatccatcccttcatatcatccacataacacctactacaaagtctgatactgttgaatgaatgaatgtatgcacctgccatgtaccacccaaacaccactacatccacccaactttcctttatccatcctcctactcgtccactcattcagccatccatccatccaaccatccacccacatgtccgttcattccccgctgatctatccattcatcttcccaaccatctgtttaccattcatccatgtacctttccatccatcctcccatccatcagtccattcatctattttcccatccatttatcattctactccaccatattcccatccactcatcctcctatccaccattcctgtcattcatccacccacccatctttccgtccacacatcatccatccatgtattcttcctagatttccacctacccatccatccattcatcatcctcccacccatttacccactcctctgtttatccgtttccccatccatctgtctattcatctccaaatatgtctacccatcccctttacccatcacatctacccattctcccatctatcttcctgctttttcatccaacaacattttcttagcatttgaccttgtgctaagagttatgagcattgaaatgtgtaagtcatcacctgggctgcccagaaggcacaatatttagttaaactcagagcgttaagtattgtgatgaagggagcctcaaagggtacaccttgttaagtcagtggagatgtttgttaggatgggccagggaggactccagcaaccctaaccttgacttttattctgtagattggtgagctgcccccacaaaccaccaagaccctggctcgcttcattcctgaagtgagtgccccacctccccatcaccactgcaccctgtcctgccctattgtcctccagtctgtcctgcagtgggacttgggagacagcttttcatgccacatattccttgtccaatgctgaaacatcttttcttctttataaagtactttttgggtccaacatagaaaacagctctacttttgtgcattgtactttctgtccaatagagaatagccaaattgtgtattttgtttcttttatttcctgatagacacatcctggcctttgcatgttgtacttcctgtgtccaacgtagaaatcacctatgtcttgagggaccccttatttcaactgaagccaccagtctaaggactggccctgagtgaagtgttctggtttctgtaggtggctgtagcttatcccaagtcaaagcccttgacgacccagatcaagataaagaagcctcccaaggtcactatgaagacaggcaagagcctgctgcacctccacagcaccctggagatgttcgcagctcggtggcggagcaaggctccaatgtccctctttctcctagaagtggtgagggaaatcgttcccttccccatttattcccaatctcttggatattcagggctggaggatgggatttttagttgacagccaagtcatggatcagagggatcagttaatcttgattatgtctgatccttggctctgccactgaacctttgaatggctggaaagcccagaaaatggagggtcagtggcttagtccttcctttctctttcctccctccaacattcttcagcaactacaaaggcagtgaagggtgcactgaagggactgtgggtgcctagggagattcccaaatccaatttggggaaatcacaaagggcttccaagaggaggtgatagctgagctatgttttgaaggttgagcaggagcttgccagagaagggttggggacagagagtcttaccagggagactggggacagaggacaccccaggcagaggttccagcatgtgcaaaggcctggatcaatagtatgatgtgtgcagggacctactgacagtgccaggtattttgggggatgctgccctgactcaggacaaggagggatgagaagcctgggctggcgctacagggagatggctgggttcagttcctgaggatgggcagagagaagatcccctgctttgtcttggcaatggtggtagtgctgggagggtggtggtctctggctttgccagccctgatggtggggaacccactgccttctccctgcttcctccccaccatgccagcacttcaatctgaaggtccagtactcagtgcatgagaaccagctgcagatggccacttctttggacaggtacgaccctgctgcccaatgctggcatccctgttaccttcacatttggccttctgatctagcacaccccacactaccgagctgatccacccagcacacccccaactaccaggctgctctagctacttttcctgctctagaaccctcaatggctcctcattgtctgcataatcttttctcaaatcttagcctggtactcaaggcccttctcaagttcttccacctctaccctcactcttcccctaggctcttttacagtgaatctggtcatgggcccatgcccccttttccattaataagcctttacccatgccattcacctgagagtcagggtccagctcaaatgccacctcctccacgaagcctttccttatactaatagcagctaacatttatttatggagctctctctatatgtgaggcactggctgcatacattatattcatcatcctatttcattcttacactttgggaggagggtactacaaacaacttagcttaacattcggtccctattaattcttgtacttgccttaataatgaatcacatcaggattaattatgtcaggattctttccgttgcaagagagaaaattccaactttaactggcttaagccccaaagggaatccttggctcatataactgaaaactttaggagtagttcttttttttttttttttttttttgagacagagtctcgctctgttgcccaggctggagtgcagtggcgcaatctcggctcactgcaagctccgcctcccgggttcatgccattctcctgcctcaacctccagagtagctgagactacaggcgcccgccaccacgcctggctaattttttgtatttttagtagagatgggatttcaccctgttagccaggatggtctggattttctgacctcatgatccacccgcctcggcctcccaaagtgctgggattacaggcatgagccaccacacccggcctaactttaggggtagctctgccttcaggtgtggttggatccaggcacacaaatgaactccttgagaatctatctccttcttcctcttgactttgctacccactttgttgactaaattctcaggcagcttctgggtcatagactcacccgagggactttgggtttagcccatctgaatgacttggaatcagagtggaaaatggaggatgtgttactggaatagagaatagatgagcagagccaccagatggccatcacatggcctgttctggtggcaacatatgttagtgcctcctggaggctgtacagggacggggctgggggaagggctcctgttctgtgtcctgcaaggatctgagactgcccagttgggctgtaaacctctgcatagctggccttgggcaggagcaatagacacaaatgggggtcccagagggaagagtcaggaccagtctagtggtttgagctttgagaaatcatgtgctgtaacgaaaggtagtgagtgtcccatcacaggtagcaggcaagcagactcaggagcacctggtctgaaggctgtagaggggactcctgcatcagggaggcgttggggtgcttgggacccccttctccagcgccagggccactggctctgaccgttctttcccctccccgcctggcttgcttccccactcccccacagattactgagcttgtcccggaagtcctcatcgattggcaacttcaatgtaagtgtcccaagtgctcttgcctgtccggcgtgaggacaagactgggcctattctccctcggaactacagggccgaggccctgaaatggaggcagatgaacagagcaaggccactgtgaggcgtggcgcacctgacttgccgtgtgagcttaggaaagtcccttagcctctctgaatccctgtttccttttctggatagaatctggacatctccctggattggttttaaaaacattgtcatgaacagtggcagcctgggttggccttggttggccaagctgttatttttattagtctctgtagcctcagggcccaacacagaacctgaccccaggaggtgccaacaccaccaccacttactctgcgatcatgtgctttatccaaactcttttaatcctcatggaaaccctgggagcaggtgcgattatagttcactttcaaaggtggggaaactcagctatagagcggtggtaagtgagggactcatcaaagctactgagtttctgtaggaccaggactggggtccacagagccacttcttgtctcatgagttttcctgttcctgcaccatggcccaaagccccacatgtcataggtactaagcagaggtgaaggacacgggtctacagtccaaacagagccaaggccaggcccagttttgatgccagctggacaaaccatttgatgtctaatattcacttctgtggtccccaggcctagccagagagggctgaaaagatctgttgaatggtattggactgaatggaatgtggatgctttctctttcttctttccaggagagggaattaactggcttcatcaccagctatctcgaagaagcctacatcccagttgtcaatggtgagggttccaaaaggctttggaccatggtgccaagaagcactttaagcaataagggatgccacctgggtggtctcaaagccctatcactgggcccagatgggggaagctaaaagggagtggaagataattgctgaatctttgaagtgaatatagtcttaatgtcacctgtctgaagacaaatgcctctcccacaatttgggctctgacttttgaccccatatcataaccccacatcttgacctgggatgtaaatacattgcaaatcaggcttattagctctttgcttgtacagctggcaggcatcatgaatcaatcactgcactatttcccactatccctaccccaggctgccactccttaatcaactgcacagcagtcaggctgatatgactcttactgtatttctcagatgtgcttcaagtggggctcccactcccggactttctggccatgaattacaacctggctgagctggacatagtagaggtgagaggaggggctaggggaggtcatgtcaatcaacactgtcagccagtgagtgatgagcaagagcctacctctctcaaactggaaagggtagagcctgggagggcaggtggccatcaatataatcctgcccctcagaatctagaacactccttgaccagggattccatagaaggatacttggactctgctactctcttctcctgccatcttgggccaattacttcacctctgtctgtgtctccattttccggtgcataaaatggagatgataatacattattgtcctcatagagctgttattatgcttcactaagatcatttacctaaaggcacatagtaagtgctgaataaatattacctttgtattgcatgccaacctttgagcttcgagtggtaaatgtacatttttcttatctgatctctctgctctgggaggtgggggtgcttgtcctcacttaacagttgagaaaattgagggtaagagaggtgaagtgacctctccagggtcacaaggcaagtctacttcaacctttgcttaaccaccacactggtttccatttcctgacaaggggcccagttccattccatccctgggcctaggtggtccctggtcattgctctcctacccctttgccttttgccagaatgccctgatgctggacttgaagctgggctgaccatggcaggactcccctgccagctgcctgcttaccaccaaccacctgcaccccatggaggagaccccctgattggagccaggtgggcctggccccctaccactggtggctgcctcctttgacaaggagtgaatgggtcaggcctgggctggagccttgccaataaacaggagaaaggctcttataaatatctgatacttcggtctctttatttttttaagtgacaaatctgtgtgtggcgattctttccttttggtgggttttggggtctaagaccagcttgggatctggagggaagctggtcacagcttgggggagttcttgggcacatattgagtacctgctcaatgccatgcccagggctttacttgtaccatctcgtttaatctacacaataactctattggtggagggcaagtgtcatccccaccttacagatgaggaaattgaggcacagggaggccaactcccttgtccaaggtcacatagtttagcaagtggcaaagctcttcccaccttagctgtgtgcaaaatcttggcaacttgaagatggctgtattcccttggaacctgttacaccaggagccttccctgtgtcaccttctttaatcctcacagcagttgacgggggtgagaaaggtcctcatttcactgatgagattgaggctcagagaggtggcatgactggcttaagccacctggcaagtcaggaggcagagctaggattggaatttgggctgtgaagccagcttgcctgggttcaaatccttcctctgcctcctctttgctgtgtgtcctgggcaagtcacatcaccaatctgagccttagtttcctcacctgtaaaatgagaatgatggcagtaccaacctctgttgcgggaagtcagggaacccgaacggagggaccagctgaagccatggcagaagaatataatataaattgtgaagatttcatggacatttgtcagttccccaagttaatacttttataatttcttatgcctgtctttactgcaatctctgaacataagttgtgaagatttcatggacatttatcacttcctcaatcaatacttttataatttcctacgcctgtccttactttaatctcttaatcccgtcatcttcgtaagctgaggatgtatgtcgcctcagaaccctgtgatgattgtgttatctgcacaaattgtttgtaaagcgtgtgtatctgaacaatatgaaatctgggaaccttgaaaagaacaggataacagtgattttcagggaacaagggagataaccataaagtctgactgcctgctaggccgggcaaaacagagtcatatttcttttctttcagaaagcgaataggagaaatatcgctgaattcttttctcagcaaggaataaccctgggaaaacgaatgcattctcagggggaggtctctaaaatggccgctctgggagtgtctgtcttatgcagttgtacataagggacgaaatacgccctggtctcctgcagcgcccccaggcttgttaggattgggaaattccagcctggagaaattctagtcagaccgattgtctgctctcgaaccctgtttcctgttaagatgtttatcaatgacaatgtgtgcccagtggaacatggaacctcattagcaattctaattttaccctggccttgtgatcttgctctgcccccatttgtcttgtgatattttattgcctttgaagcacgtgatctctgtgacccacaccctattcatacactccctcccctttgaaaatcactaataaaaacttgttggttttgcagcttgggggcatcatggaacctgccgacatatgatgtcacctccggagacccagctgtaaaatttctttcttttgtactctttctcttttacttagggaaaatagtaaagaacctacattgaaatattgggggctggttccctcgataaacctcagtaccaacctcagcagagtcattgtgaggatcacatgagtgaaatcttaaaaggtacttagtacagtgcctggcacagagtaagtgctcaacaaatgttagccacaggtgggtttttgagtcagagagatgtgcacaagtgtttttgtgttggtgtgtgggcaagtaactatgtggccctgaaccagcgcacgtatcagtgtataaatagcctgtggatgagtgacctggtgggagggtctgtgcagaggcagggccaagagtggaggtttgtgtgtgaaaggcccctggtgtccatccgtgcctgtgtgtgtctgtgttcccatgttaacttgcacatagtctgtgccaagggtgtttctatgtctttcattcatgtgaggatcagctccctgacatttgccgtatctgtccccagtgcctctcctgggattcacactgatgctattctttaaactgactccttttttacataaattatgtttacatgtaatcaagttaaaatacatcttaaatgtattctttaaaaaaatctgtcaaacgattaaactaaatcaatttgtgaaggaaacagtaagatgttgcatctagcttgaaggagaattcaaagtgcagacacatacacaagccatcagggatgtggaaacgaatttgccagaggcttgttctgtccttcacatgcattcctgtggttcatctacagcttccagagttgaagagtagctgaaaaatacactattgatgatacagctcagaggcaggcaatgagtaaagatccagagatattttgaggtaacaaaaataattttaacgctagttaatgaggaaaattatttcttagtgctcatcaaaaacatgactttcccattcaggtttatttgtaaatcagatagaactaccatctcactttatcagttctatccaatgttaacattaacaccaagaagaggaagcagtatatgacagaaatatatgtgtatgtgtgtatatatatatatatatacacacacacatacacacataaattgtatacatatatggatagtttacatttcccaggcagtgttcagaaaaactaaaataaaaaaagaaacaaacacaaatataattttattttgtcttaggacaaatataattattttgtcttaagaaaatcatatattttacatatatatatatacacatacatatatataatgcctacatgcatattaatatatatgtatgtatgtacattcactttatcatatgctacatccgattgattttttagatggtaattcaagtttgatctttgttctgggctactgtgttttctctcaactgtcaagttacgtcttatcaatactttagagagtgggtcaaggcaacacgggatgaaaaggcagacttcaggaggctaaaatcactagtgatgtagggggcaatgtgggagttatcgacttcctctgtctttcccccagtagtgttgaccatgagagtggcctaggaggaccaccatgtagactccgactccctctcactcgtagtggggcaaaccaaacagctggggctggaagtcctgcagggaactcagcaacggggaggcctttctggtcaggtcttggctcaagtttccatctggaaccatgaccacctgcatcctggcgtccagggctgcctccaccttgttgggcacatcttcaaagacagggcactcctccacaggaggaggaagagagaacctcctggcacaagtcaggaatatggcagggtcgggcttgctgctcttcacttcgggtcgtctcccagcatgatgtgatggaagactgaagagttcttgtgcctgcttgtcttcacctcgaaggatgcagactttgagctggtggccacggcaaaggggatgttgtgtttccgaaggtggaggatgagtttctcagccccctggcatgagcgctgcagtggggaacacatcccttggcctggcttggctttcttccaacagctcttccaccaggagctgcaggacatccacgaccacctgcgccacctccaacgccttcttacccatgaccagggacttcacatccccggtgtattccttttcatagcgatcacatatgtcttgaaacaccactgaacagagcctttcagtgtccagaagcaggccatccacgtcgaagaggaggtgggtggtgggccgcaggggtacagccataatgcctctgcttgggctgcattggggcaaccaggaggtgtgcacatacccaccagccccgcacacgcactgcaggttccagaaaaggacttctaagtggagcctgcaaatcagtgtcacttgcttaatgtcttttttaaaaatctagactgggtgcaatggctcacgcctgtaatcccagcactttgggaggccgaggcaggcggatcacgaggagatggagaccatcctggccaacatggtgaaaccccgtctctattaaaaatacaaaaattggttgggtgtggtggtgcgcgcctgtcgtcccagctactctggaggctgaggcaggagaatcacttgaacctgggaggtggaggctgcagtgaactgagatcgcaccaccactccagcctgggtgacagagcaagactccatcaaaaaaaaaaacaaaaaaaaaacctttaactatggggaaaaaaatgtatcggggcctcctatgatcagctggtgccccagccctggaaattatgggggtggcggctatgtgtgtccatatgtctgttggggtgtgtgtgtgtgtgtgtgtgtgtgtgtgtgtgtgtgtgtcagaatgtctgtctccctggggtgaggctctggatgtgggagattgggggcgtctttgtgagtgggtctgtgtctgggcacattcatgtgtgtgtgggtggtgtcgtgtagccagaggcctgattaggtcactgctcccctagccatggggccctggcaggtaagccctctcccagcctagcccaggcccatgccacagaggaaggagggcccatcttgcctcatcccagatgccagggctattcccctgtccctcaacatgagctctaatcccgtcactaatcgtctccccagctctgggacaatggcagccttgagggaggcctggcaggttcagatgccagggtaatccatgggctgctgatgcctggccctgggcgtgccagagacgcccctctgcccccaacccacccttggatgttcccacagcacacttatggctacctaaagccttgctgccaccctctccaggctcagtgtgctgatggggaaaccaaggcacaagctgttagggtttgaaggcctggcttcttgccaggccttgggtactgtgtggccttgaacaagccacaactcctctctcaacctcagtttactcatctttacagtaaggaaggggttggatgctctgacctctaatctgatgtcaacagtctttgagtggtcagttcctccagattcaccctgagcagaaaatgtgggctggactggcaagggatccctactccatgaccccacttcctggggaggcagtgataggaggtctgctgggcactgctcacctcccagaatcctccaatcccagataaggaagtagaggcccagaaagatgaagtggcccgcccaagggcacgtggcacatgtggagctggacttgaaccctatcttcctgagttcaagtctcttcctcactccttcacaccacactcagcagtggaatgcagtgttctcctttcaagaaagtgaggctcaaggctacagagtcagaaaagagcagagggaggtcttcgattctgggcccacagctattgaccccccgggacctgtcagacagcctcaccctgggaaaatgaagccacacgatgttccccacacctgtgttcataccagtacccacttaccttgccttctcccttctcagcccactctcagctcgagtagcatggggaggcctcccagggatctcaccaccatctgcacccttggcccccctcccttgatgccttaaatttcatttctaggatacctgtcctcacagccataccaattaggtgaggagggccacctttaatatgagcccattttgcagatgggagaactgtggctctgtgagttaagtcactcaattgtgagtgacagagccagaatgtggacccagaaattttggctccagagcctttactctaggaactaatgcccaggggtatttctcctcatcaagtccctcccctgctctaatcccttccttggcttcccatcaccctcaccagggatatcaaaagggctgcacatcatattgccttgggggcttgttaaacgtccccctaggtgcttgtcagtggaatcagtgttgccaaaggtgaggccaagagatatgtattttaatgaatcccttcccgtgggcaggcccaatccctgacctggctttggtgcatgaggggatatggggacgcctggggagcttatgggtgtgtcagagtcccctgttgggtggggatcgggaaggaggaggagagacgaagcaggccagaaacaactaggtagcattttcctctcttccaagaggctaggctgggcagtggttaagacaatgagtgttagacggtctggctggactcctgtgtgacatccggcaagctgcttacccttgctgagccttggcttcttgagtgtaagaagaggaaataataacagcactgatctcactgggtctttgtggtgactagatgtgctcacatacagcaggtgccttgtacacggtatgtgccgaataaatactagtgttagttttctttcctcttccttcaaacaaatgccttaaaaacactggggatacccagcacagatgaggctgtggagtagcagcattgaccacgtgcaatggcataatgctcaggggaaccatagccatagagagtatggctaaacatgcgcatgcatgctgtgctccagcaattcagctccttgttatttacccaaaagaaatgaagaataaaaacataggcccaagctgggtggtggctcatgcctgtattcccagcactttgggaggctgaggtgggaggatcacttgaggtcacgagttcgagaccagcctggccaacatagtgaaactccgtctctatgaaaaatacaaaaattagccaggtgtggtggcaggtgcctgtaatcccagctactcaggaggctcagtcaggacaattgcttgagcccaggaggcagaggttgcagtgagctgagatcacaccactgcactccagcctgggtgacagagcaagactctgtctcaaagaaaaaaaaatgtccacaaacaagagtgttcatagtagcttcattcataatagccaacacctggaaagcccaggcaccactggacaggaaaatggataagcaaactgtagggattcgcataattgagtagtacacagcaaagaagacccagtcactgcctcacacaatgggagcagggaagccacgcacataaagcacacagcggttgcacttagtgacccccaggagcatgctggactcagcactgagttagcggtcaggacagtggtcaccaccaggagggcagtgacttggaggggacacaaagagggctttgagagggctccatttgtaaaaattcatcacactgtatacttgtgatctgtgcccctttttgtgtacatggtttagattttagtaaaaagtttatcttttaaaaaagtgtggtgtggttgagtaacctggtccagggcctaaagtcatcagaatgaacattgtagggtgagggctttagagatgattgaggtaaacaaggcaaatgccatccttcttccccatcttagcaggcagaggttcagggccccacgcaggagacagacccacagactcacagagccacagacacagtgacagcttggcatgtcacagattctgagagaggaaatcccaggggactgtgggagctcagaggtgatacctcatgcagcttggggctcatgaaggcttcctggaggaagggatgcctgagctggtgccttcagaggaattgccaatgaaagccaaagtctgtaaatccatacagtagcttccagggcttcatcacacattgtttaccacctatctctcactcccctccaatcacatggcccccctgctgttcctggaacaccaccctaggcctttgtgtgggggtccctctggtcagcaggctcttcccagacagccatctgactccttccctcttctccttctggtcaaaagtcacccctgcttcaatatgaggccttccctgaccacgctattgaaaatggcacccactccccacactcctgagccccttccctgctttatttttgttgttagcttccgacttactgtattttttttgagatggagtctcactctgtcgcccaggctggagtgcagtgaggcaattttggctcgttgcaaccttcatctcccaggttcaagtgattttcctgcctcagcttcccaagtagctgggattacaagcatgcgccaccaagcctggctaatttgtgtgtgtgtgtgtgtgtatatatatatatatatatatatatatatatatatataattttttttttattttttttgaggcagagtccctcactgtcacccaggctggagtgtgatctcagctcactgcaagctccgcctcctgggttcacgccattctcctctctcagcctcccaaatagctgggactacaggctcctgccaccacacccagctaatttttgtatttttagtagagacggagtttcaccatgttggtcaggttggtcttgaactcctgaccttgtgatctgcctgcctcggcctcccaaagtgctgggtttacaggcgtgagccaccgcgcccagccccaacttactgtattatgtgcttatttgtccctttcagagctgtgctttccaatatgacagccaatagccatacaaggcgattgcctgaagtgcgacaagtccaaatcttggtgtgctgtaagcagattttgaaaacttagtatgagaaaaagaaagtaaagtaccccattcataattttctgttggttatatgttaaatgagaatattttggatttggtgggggtaaataaactagactattataattaatttcacctgtttctttttgcctttcaaaaaatgtggctactagaaagttttaaattgcattgcatttccactagtcggctccttcagggcaggggagattgtctcttttatttacagcgatttccccagcatctagcagacagtgggtgcctcacaaatgcctgcagtggagtgaatgaatggacgcatttctcgtcgctgtcatctgcaccagcctcggaaaggggacaaagctctggaactctggggatactgagccttgggaggtgggggtggagttgatgcccctcccccaagtgtgcccagagtccctgtctccaggcccatagccctctccatgtgaggcctggtgcggggggagggtggcggaaggtagaagacccagcagctttaagtcccttctttccctccgtaggccttcgctggggaaggggtggggtaggcagggtagattctgtgccattggaatggctcttggggagccttggagggagcccaataggtggctgaatgggtaggtggcagggccccacacctcacccctggctctgagggaggtggctgcctgtgcagcccccacgccttcactcccactcctgggcaccgaccccagtccccttactcgcctccaaggaggaaggcttagcccaggccctcggggaaaaccgcaatttgcttctgacatgacatattgacgggattctggcggccgtggcccctttgtgtcctcagagccgcgtgggcatataagggccacccctcagctcgcgtgggtggaggaaccgacaggaggccgggagcccccacctaccccttgtggagctgcaggagcaagggtaagacagcctgaggcagccctgctcttgtcctgacgcccagccgttgaccccactgccttctgccctcccatatgaatgatgggcacggaaagaactcaccctaggaggagactgggggtaccaagagggtggatgaagagaaaaaccatgttacagatctggggcccagagagaggcaaagacttgtatatattcacagccggaggggtgggcaggggatccctgtccataggatgatcctatggagagagttccaggagtgcccatttttctcctggccagtgacatgctgctgaatttctatcccctgccccctcagcagggaccccttctgacacacaaccacgcacagaggccttagacatggtccctgccttcatggagtttacagggaagagaaataaggacacaaacagatgcataattgcaaatggagatcagcaccttaaagtaaatattctgcgtgatgtttagtgacagacggatttctttagacaaagtgaaggacggaggcctctccagggaggcaatgtttatccggaatctcaatgataaggagtcagccatgcaaagaagcagggaggagccttcctaacaaggaaccgcatgtgcaaaggccctggggtgggaaggggcctggcatgtttaagctcaaggaggtcaaaaaggcaggcagggattttgtgggtaatggcaagaagcctgggtttcaacccagggcagcggggagccactgaagggtttaagcaggagtgatgggtgggcatagatggatatgtgattgggtgggcaaatacggaactgcttaaagaaaaatcccactctgtgaacttagcagattagccatgcccccacctgccaccccattccctttttcaacaagatttggggtggaggtgggggaaggagaaagataagacatgttaagtctaagtgttgggtgtccccagtcagctagaccttctgaaacagcctcatgagccagtgggaagcagctgctggaaacaaagctctcatcctgctgtcctggagggggaagcccctctgtctgcagctgtcactccagacacccggccaggctcactgggcctctgaggatgaagatttttatgtcagatggactcaggcttgaattctgactgtctctgattagttctgtggccttggtctagtcccctacccctttcggtctcagttttcccagctgagaaatggaacccaatgagggagaggcttggaaagtgccttggagacttgagtgcattggcagctgcaccgtgccacctgcgtgttagctctgcttacatttgggaggagaaggctttcctgggagtgaagctcaatttgggctgtgccaggtgggcaggaagggggaaggctgataatgggaacagagaggggaaaggcttgagcaggagaagggtctcagagttcctccttctgctccttataggcatgcagccagtcatgctggccctgtggtccctgcttctgctctggggcctggcgactccatgccaggagctgctagagacggtgggcacgctcgctcggattgacaaggatgaactcggcaaaggtgagccccaggtgggcagtctgtgagggggctgctgcaatgtcaacgactcaatctatatgcttagagcatctgctttaagagcagataagagcaggttgtgattctcagctgcttagagagcacattctcctgggagtagctgtgcaggagtgaaagtttcccttgcaggcttgaatgggcgatgaattccctcttacgggaggtggactgggtgatatgggctgaggctgtttggggactgtgtgtggctcagggacagggacagagtgaggttgaagaggtcgaggggagggtgctagctgggccagtgtctctgcctcacatcactagggtaagggaactgtacttggcatttggtactacagagcccggtggcctgtggtgacagtctcagggatagagtagattggtcatgagcaggaaatgcttcagagaggccccctggcctgcctctactctacagggccattcctccatcctgcccttcccacagtctgcacagagtcaggcctggagtgcccaggagagaagcagagaccatctcctccaacttgattgagccctggtggctacaagctcccccttctttgccctccctttcagtgctgtagggcagtccaggatcaggagccaagttacactactgaccccaacccaatttgctgtgtgactttggacacgtctctgcccctctctgagcctcagttttcccactggtaaaatgaagggattgttatgagatttgctcattcattctccaaacacttactgggtacctcccacatgccaggcagggagggtggccacaggccctgcggtgggagtaagaggctgttatggcttagtgggttccaccatttgagtgtaacctctgggttaattccatttttaaaaagaagcctactcaatctcagaggaaggaggcagctgccatggtcctgggggtgaggttggagtttctagtaccttcctacttccactctctctgcagccatccagaactcactggttggggagcccattctgcagaatgtgctgggatcggtcacagctgtgaaccggggcctcttgggctcaggagggctgcttggaggaggcggcttgctgggccacggaggggtttttggcgttgtcgaggagctctctgggtgagtcccacctgctgcatgccctacaggaagacttggctttgcttccaggaattgaggagagattgtctctttgtaatttgtccaataggcagtgaaggttgtgtgggagggttgtgatccgggtctaaaaatgatgactctactgcatgcctggcaggacaagaacagcagaatgccactgtggttgagggttccagctctggggtcaacactagttactcactgtttgaccttggggaagttgcttagtctctctgggctaatctagctatcagcatggttccctttttcacctcctccaggtgtccgctcaaaagaggtgtgggctgattagccctttcttatccccaccatacattttacaggtttattttatgtctcctttgctagattataaaccccaggaggggtaggatttttgtctggcttattcactgttgtgtccccgggatcataaatagggacacagtgtatgctcaaaaagcttttttttccctttttttttgagacacagtcttgctttgttgcccaggctggagtgcagtggcatgatctcggctcactgcaacctccgcttcccgggttcaagcgattctcctgcctcagcctcccgagtagctgggattacaggcgcccaccaccacgacgggctaatttttgtagttttagtagagaagaagttacatcatgttggtcagggtggtcttgaactcctgatctcaggagatctgcctgcctcggcctcccgaagtgctgggattacaggcgtgagctggggtctgaatgtttgtccctcacataggattccagaagactgctacgattgtctgaatgttggcccctcacacaggattccagaacactgttaccaggttctgaatgtttgtccctcaaataggattccagaacactcctgctgtggtctgaatgtttgtccctcacataggattccagaacaccgctactagggtatgagtgtttgtccctcacacaggaccaaagaacactgcagttagggtctgaaagtttgttgctcatataggattccagaacactcctgctgtggtctcaatgttttcctaaacataggattgcagaacacagctttttttttttcattcaaaaaaaaaaagtatttttgaatgaatgaatgaagagcatcacattatagctaatatgcactaactcaatgagcacctattcagggttttctgtgtgtctagcactgtgcattgtaaatgaattatctcactgagcccagaggtaggactattatgaactgcatttaacaggtgaggagatagaggctcctggcagtgaagtgacctgcccaagctcacccagctaggggaggagatgggaatgtgtctgtgtgtttcatcacagcccatactgcctggtcaagtccagtggaaaccagtctatggctggtgggtgaattaggggaaggtcaaacaacagggcccaggcaaggctgaagcccagtgtatggagaagagtcactggacaggaggcaatggggtactgggagcggaaagaagggctgatgggtgttcacttccctaaacggaacataatgtccggaaagcaggctggtaaatgctgatgttgctcgaggttcgctgtgtgtcattctgtggtaggtgtggtcaatgtccctattttacagatggggaaaccgaggcacagcagcactgtgactagcccaagcccatccagtcagttagtggcagagctggagtttgaaccatctgccttttactggctgcagtattagcagctactcatggggttgttgccaggacagtgagttaatctgtgccaagcagctgaaatagagccgggcagagagtaagtgttggatagatattattattattattaatgcaatatttactctccctcccctgtgaaatccgctttcttggtgaggctggagtctcagacatgagcttggcattgttcgtgccttgaagagctcctcataggtggtggagtctgacagcgaagatcccatgggctcagggcagtgatggaggcagcccaggcagggtgggataggcgctcagagggcatctgcccgaggcagaaaaccaggatggaaggcttcctggaggagtgcacgtgaactgggaggagtcagcaagctgaagagggatgcagaatggaagaagggtcaagggaagtgtgttccagacagaggaaatggcctgggcaaagacccagaggacagagagtaatgacttgtgaggagtcgtgtttgagaacccactcgggttgcatttgtgtgagtgtgcaggggtatagcagggcgcaatgtcaaggccagaaaccaaaccagggctgagactgtggggatggagtgaggaaaaactttaattccttgagcctctagcggtgatgatgataggacatttgttgagcacacaccgtaccaggttctgcactcgaattatctcacttgtctttgcaacactcctgtgaggtaggaactagtatcgccccactttacagataaggaaactaggcccagagagatgaagtgatgggccaagggctcgcagctggctctgtgggtttgaggtgagataggggacaccaccaagagccactctgggcgccgcctgggctgggatgtctgggagtgagcaaccctctccctgactcccatcctagtctgaagattgaggagctcacgctgccaaaggtgttgctgaagctgctgccgggatttggggtgcagctgagcctgcacaccaaagtgggcatgcattgctctgggtgagtgtgtcctggggacctctaccctcctgcttcctatcccaccccctgacctgttggagactcctactctgctgtccccccactcccacccctctgtatcccccatttcctttcaccctatttcctccccaagggactcccaatcctactgtttcccccctggatcctatgccattgcccttccccagggacttccatttcgctcttcctccagacccggaccccaccgctcaggctcacctgagagggtcagggaagagggtgcagggaagtgcaaaatggggcagggaggcagaggctgagaagggggcacagagcctaggccactggcagggccaccctggtgggcggggccaagggtgggagctggctgcctggccacacccccagtgtcctttcttgcagcccccttggtggccttctgcagctggctgcggaggtgaacgtgacatcgcgggtggcgctggccgtgagctcaaggggcacacccatccttatcctcaagcgctgcagcacgctcctgggccacatcagcctgttctcagggtgagtctgcaggttccagcctgcaaccctgacccgctcaggatcatctcgcacccatctgggcatctcccaggtctccctggagctgccagctgcgggggcctgaactcgtcctacccctgcttgtcccgccggtttcaacccacttcacagaccgacagattgagtcccaccactgacagggactccggcttaatccatagcttgtgccacccactcctgggcaattcctctagtctggttcacgggatcctgccgtcccctctccgccagagcgggcccagggtcagctgggatccctccatttgcgggatttcagcccctgctctcagcacatgagacccaactctgcctctgacttgctgtgtaacctcagggagacccactccctatctccccattctgggcccccatgtccccatctgtatatgtggagctggatttgatgattcggaaggggctgtgacttcagtctcttcccaggatctgtccaggtggccctccctacaccttgttgaatcatcacttttttctttttctttttcttttttttcctgaggcagagtctcactctttcacccgggctggagtgcagtggtgccatctcggctcactgcaacctctgcctcccggcttcatgcaattcttctgcctcagcctcccaagtagctgggattacgggcgcccaccaccatgctaatttttgtatttttaatagagacggggtttcaccatgttggccaggctggtctcgaactcctgacctcaagtgatctgccctccttggcctcacaaagtgctgggattacaggtgtgagccaccgtgcctgacctctcaatcatcactttcatgggaccatggaggcccagaggtctccttgcctaggatcacacgcacagatccggcagggatggagaggggctgcgctctggctgggtccaaggcctctgccagcactctgagccagcccacagctgcctcccacttgtgtctccccgttctgtgtccaccttccaggcccaatcccaatcccggcccctgctccatctttgttgggtaactctgagcagtgggggatcatcaggcagttctgtgttagctcccaggaacagggtaactgggttgctcctgtctccacgagggccctaagaaagggattccaggcaagggctttgggctccttaaattccagtggttcccaggatggtgttggtgtcctgtgtttggggctctgtggttgccatcctgcaccccatggtctccaaacagacctgagcctgtctacatgcacttatcctcaggccatcattcattcattcattcattcattcattcattcatctaacaaatacttgttgaacccccactctgggggctcaataacaaccattgtcctaggcctaaatgtctcttgtctacaactgttagagggacaaaggagacagacatttgtcaagcacagattttacaccagccacatacacactcccatgtaacccgggcagcagcagctctctaaggtgggcattgtacagttggggaaaatgaagccatcccctgggtcccctcgggaggaggagccaggatttaactcaggtctccaaagccgcagtcaacaccacccccaagagaagggagaggagaaatccagagcccctagtgtccgcccgaccctgtcatctgggttgaaccgtccacctggcagccgcacccacatgtgtctccctctgctcaggctgctgcccacaccactctttggggtcgtggaacagatgctcttcaaggtgcttccgggactggtgagtgtgcgggccgtgtgccagcatgccctctcccaggactgggcctctttccccctctggttttgggtgaagtttggcgccaggcaggattaggctgtacttcccttccacacccacctggtaatcccatccgggcctgctgaccggccttcctggcgcgcctgctagtctgggggtggatgacacgatcctttcggcctgggtcccctgctcccaaatcgtaggctcctaagaagggtaagaacccctgctctgtttctgccatttgtattagtaccaactttatgtttttctttaaattagcgtgaaatgaaaattggatcacttggtgattttaaactgagccctgtgcttggcaatcatgtctagaaaaacacatgtacctttattcatacatcacaattaaacatattaagattaaaggatgcctgtccatggcctgccccagaacatcctggcttctgcactcgagagagctggtctggcccaaaccccatatcaccgaggaagaggggagggccacatagacagcaaagggcagtcaggcctcctgaccccacggcctagctggctctccctgtgcattcttgcgaacgctgctgggggcagcagaagaatgggagcctagggttggcaaaactgccctgggcttgaggaagccagtttggaaaagaagcttagcaggaggaggggcccctaagcaagaccatgtcaggcaggtttccaccagggcatgaaggtgcatttcaacggcagcccctaacttagtctctggggcaattggccagcagctaggttttgtgtgatacaaagaggttttgaaaacgagcattcattgccaacattcagcattgaagatttctcgtaacagtccagatttctggcttctgttttgcaatcagccatcctggctgcctgatacctccctcctgtaagtgggaagtacctctggtacctcccatctggtgctcagagggtttgctttctccatccccagcagagcccctctggtctcctctcatttctgtgacttgcctgaccccagaaatcctggagtttggggcccccacttgacatgtgacagccctcttttgtctctctgaatacagctgtgaccttggacaggccaccttcttctctggcctcagctggaggatgaaggggctggactgcatcctctctgaggctcccactccagtgggctatgggactcaggttctgtgattcccagacttggattctgaaagttgaaccacttgctccctattctcctagcacaggggttaggaatgaacacgtggtgatatgcagaatggacactccagatccaggcctgactctctgggtggaggagaggaggtgcccctctgtggggtcttgatcctaggcttcccagtgcccacgtagaatggcaggggatggcctgtgactttatggggaaccaaagccgcttttgcctcctcaggtgaaggccttgtccgcatgcccaaaccagcccctgaaatgtgtctcccgtggtcccccagccacctttaggggttttctaatggggctcttgtaaccaagggaagacagcttgggggccacccaaccctctgacacctcaagcccccagccccttccctgcctcccacctgtgtgtcttctgtctgtctctgccttccgccttgccttggtccccagcaccacatagcagcagatagcaaagcatttaaagaacatgcagctgtcctcgcagtgagctcttctttgccctgtaacatgtgtctccctgacacagctgtgccccgtggtggacagtgtgctgggtgtggtgaatgagctcctgggggctgtgctgggtaagtcagggctcaatgccctcctctttgccccttctacccgtctctgtatgaccccaatggggtagggtacgaaggggagccagaagcggcaggatctcagggtcctttagttcctcctcacactgacaggctgcccctttgaggagcctcatggaggaggcctgggctgaggccgcctagcagggcatgcagacccagaaccatcagttctctctatgttgggtgctgcagaccaacacttactgagcacctagtgtgcgcttggcactgtcagaaacagggggaagatataatgattacctggtcagactagatgaccgaggcccagagagctcaagtaaggaacccaaggccccgcagccacagcagaccccagtctctctgtgccttatggagacacaagtgccttctgtgttcacaaaatgggtttgggaaaatataaaaaggcacaaccaggaaaagaatagaaaacttggggccggtatgtctctatgggtggtgttatgtaagagaggcagggtagcagtgtgttagtggcatcaactctggaaaacaggaatcctggttttgaacaccgtgactgtgtggccttggcctggtgacttcccctgtctaagcctcaatttccacatctgtaaaatggggatgacagtagcagccaagtgaatgcttagtagagtgctaggcattcagcagacactcaataaatggaaataggggctattatgattgggaactgggcttatagggtcgttctcgcccccactttcccacgcaggcctggtgtcccttggggctcttgggtccgtggaattctctctggccacattgcctctcatctccaaccagtacatagaactggacatcaacgtgagtaaccagaggggcctctcctcctgctgggggtggctagataggggatgccggatcaaggcaggtgggtgagcaccttaagaccctcctcggccctgtttcctgcccctgcagcctatcgtgaagagtgtagctggtgatatcattgacttccccaagtcccgtgccccagccaaggtgccccccaagaaggaccacacatcccaggtgatggtgccactgtacctcttcaacaccacgtttggactcctgcagaccaacggcgccctcgacatggacatcacccctgagctggtgagtgtggtgcccgggggatggggatgggggctccttgccctgctgtgccttggcattactagtgttgacctaggccctgatcagccttgctgagccctcctctctataataaaagggagttgaacaagtttagagtgtgtacactgctgttctccactcctatacttaggggagacattgctaatcgatcgtggtcctctacctggttaaacctgactgggacttctgaatccttctcaacttggcactccaggaggtcactttcaattggtcaggactggcatgtggaatgaagcccactttccatacctgtatcagatgagcctttctagagtctaagcactaaagtgtgaaccactaaaatttccactgctttctcaagagcagatttgagtgggagaaaagaaaactaggcagggtggctcatgcctgtaatcccagcactttgggaggctgatgtgggaggatctcttgagcccaggagacaccccatctctacaaaaaatacaaatattagccaggcatggtggtgcatgcctgtggtcccagttacttgggaggctgaggtggaaggatcatgtgagcctgggaggtcaaggctgaagtgagctgtgattacgccactgcactccagtgtgggccacagaatgagaccttgtctcagaaaaagagaaagaaggaaggaaggaaggaaggagagaaagaaaagaaaaagaaagaaagagagagaaaagaaggaaggaaggaaggaaagaaggaaggaaggaaggaaggaagaaaactagggttggattgtaccaagagttacccaaacatttgttctgcagcttctagtacctcccaacttccattctgtccattctggcccctctgacatcctggaaagcccagaccccagaagccccacccagagacatttattttggtctcagcctgggctccccacctgtagctcaggcccaaggaaacaggggttggtcactcacttcttgcaagtggggtccagacagcactctgaaggcctctgggaggctggaacaggaccctgagctggggagagggtgtcttccagctgggggatgggggtagtcatagccaggcagagactctgcgtgtaagaacgtgcatgtctgagcggcctgcggatgtgggtgtgtgtataggagcattgggtgtttgcatatgagcatcgtggcaagagagaggaatgtcagaggcctcgtcctggtgctgcatgtatgcttatcctgtgtgaacagggctgttctgagaagtgggcatatgtagttcggtgggcggggggtgtctcaaacatcagggcccccggaggctgggccatcagttagcagcctgatgggactatagtgaactggagaccctgtgccccatttctcaggcagttgccactcagctgccacaaggggagggggtgcaggctcagtgtgaccagattttccaactctttagccagaaactgaaaaatttacatgtgacttcctgatttataaatactagaaataaattcatagtttttgaaaatactatttgggtaaaaggcaaaaagatctggggtcagatccctgggcctttagatcgtgagccttggcagagtaaaaggttttgaagttagcctgcccaggttcaaatcctggtgtcaccacttaccaattgtgtgacccttggcaacagcctcagtgtctccatctgttaaatgagggcaatggtagcacccacctctttgagctgttgtaaaggtgaaatgagcaaaggcgtgcagagcccctagcatctgtctggcatgcagtaagtgctcagtaattgctagctgatagaacaaacttgagtgtttgtagtgatatatgtatgaaattggcagggtagggggaagagtggtgaacgaaactgctctgagtgtgctgagggattcctgttctgtctctgtgctcaccaaccctctctcccattgggggtccaggttcccagcgatgtcccactgacaactacagacctggcagctttgctccctgaggtgagtgacgctctcatgggttttgatcattgtagctctttcctgatgaccatgaatggagtccagaatctttctcaatacagctctccaggcaactgcaattgaacagttgagtccaaattcacactaaagtgtgaatgactaacacgacatcctttcctgatagcagattttgcttagagagtaaaggattagggcttgactgccccagaaatcaactgggcatttatcctatggaaattgtttctgtagcacacaaggacaaaagtcttttcaggttactgagctcccttctaccaactggcttacttcatcctgaccttagtcttcaatgtccccagagaaaagactagggcacttgtcttggagaggaaagaaaagggagagtgtcaggtaggtctcactagtggacataagtacatgacttccaggccaggcctcagctttcccatccttcaactggggctggaccagctgctttccagctgtgagaactggaattcgtactgaagttaaaatgtctactacaaggtccttatgtaacagcaggttctgaaagaggttggaaagaggcctaggggcctgggctctcaccagagaggatggaaatgaaagctgggtttgggggcacagaggacaaactctgtgagttcttgaagttggtgattcaaagcagtctggatgaatgaggtcggggcctcagctttccagagtcccttggctaaagggcataggagcctcatggaagggatgcgattggagtcagacattcagaagaacctccagagagtaggagtggagagggacatggggcaagtggagttggctggggcaggggtatccagaagcagcaagctgggcctgcccctccagcatggggaagctgggcttgtctctggaggctgaatcctttggtctccatttgctggcctcgcagctttagagccccatgtggcttcagattctgtggcatgtgagggtggaatcaggtgattcctggtcctgatgatcctgccccttagggattctgggcttgaggaaacctagactcaaattccagcaggcaagggacatacttatgtgttccaagcttctgtggttctgtaatttccttagtctcatgacgttgcaattatgagactcagaatttcctgattgtgtgcctcatttaggcagtcagcgtatatccactgagcacctactgtgtaacaggccctgcaatggaacaagggcatacctgcagctggggctgcacaaagggcaaaaggtgaaaggagagaaaagcttctgcactcaaggggttgccattctgctggaggtgacagacattgcacaaataaacagaaacagagacagtgtcagaaggtggaagagcatggagtggcgaagctggcttaggagtgctggctggtgcttttagacatggtgctttgcaaggcctcagtgaggaggtaacatttgagtgaaggaggtgagtgagggaactttgcagttctctgggaagatatttccaggcagagggagcagcaagtgcaaaggccctggcgcctgctgggagcatccctggcagctggaggagcagccacgtggccagtgagtctggagggagaacgcagggcagcagcgggaggagagcaggtgaagtggagaggcgggcaggggatggaggacacagagcctatggcctcggggaggattctgactctgcttgagacaggaagtctgatttggcagtcctgcaggtcggtgtctccacacctgagtgtcagcctcatgggggctgagcccaggcctgtgtctttcaggctgtaacctcgttgcccagcacgttgcccagtgcctggtaggtgcttagtgagtgtttgctgactgactgactgattgtagtcctggggcatctaagttatgcccctgcatttctccaggccctggggaagctgcccctgcaccagcaactcctactgttcctgcgggtgagggaagctcccacggtcacactccacaacaagaaggccttggtctccctcccagccaacatccatgtgctgttctatgtccctaaggggacccctgaatccctctttgagctgaactccgtgagtggtcaaggggtggctgggggcccggcattggggttccaaatgggggtgactgtctccaggactgtggaggtaccgtccccctgatttcagggtgggagccccacatagtccagcacaggaagccccccgccccacaaccactgtcatcatctgggctgagacccaagcccctgcttcagttcctgcctgctccctcctgtcatgtctgcctgggcctgtttgggctgcccacactgcttcttggggatctcagacgttgctccccatctccccagcctctctgcccagctatctccctgacgaccctccagcttcctctgaccctcccgctccagtcagcttcctccatcgcacctctgcacacatctggaccgaggcaggcccctccccctatcctccaccttggctccccatggccaaacacctgagcctgacattcattgtccttctgccccatccttgccttgcccgtccttgtcccctaagcctcagctactcaggtctaccaggtcctccctccctggcttgtctgtgctaggtccaccacctggagtaccattttccccttccttccactaactcctcatctttcaagattcaactgttacctcactggaaaggccttccctcaccgtacagcaggcatgcttgaggggctctccaagctcctgcagccccagagcttcctctcctacattaccaattgccctcaattttaatactgtggttctctgctgttcaagaaaacagcaaaaccttcaaattaccttctcagggctcagcacagaccctgacacacagtagggcctcagtaagggttagtggacggaacagatggatggaggcagacccgtcctcaagctccttctgccgattgggggtgacttctgcctgctttgcccatgcaggtcatgactgtgcgtgcccagctggctccctcggctaccaagctgcacatctccctgtccctggaacggtaacttgggatcctggggacaggatcttgttcttgtctttaggaacaagaattaggggctgacaggatccgcctcccgtttcttgagcatcagcgcaattccaggtgtttttccagcatcctccttgccttcaggacccgccagggaggagacagtgttagtccatgttatagacaaggaatcgggggctcagagcagcaggctcaagagtgggcttcttccacggcacccttttgctgctgaaaacctgcctctgaaagataaacctgccgccaggatgtggagtccaaactcctgagttatcagccccagaggctaaccaagagacaaccggccttgagtgtcaggaaatgtgttgttatttatgtggacttgttacttgttacttctctattctcctcacccctgtggtaactaggcgtccatcaagataatcataatgaccagaatgatggtgttggtgacagtccttcatctacacgcacagtactttacagtttgcaaagcaccatctacatgcacagtactttacagtttgcaaaacgccgtgctggcccaggctcacacggcaggccgtccctagagcaggtctgcagtctgggcctcagtgctgtcaccatggcagggccccggcctgtctgtccctcccctggcagtagggactttcctggagattgctgagacctgacgtcctacgccacaggcacccagtgctcctctgactccgtcttagcacccccacaggctcctcaggccactgctggcctctgccttccattgttgccccattgccgactttgatggagggcctcgcctgctgcctgggtgcacctccacttcctgatggcagttcacgcctcagtcttttaggaggtagagatgcgtgcccaggctctggccctgaatctgcacttgggccagatatgatccatcagtgagttgctgccttgagtgagcacctgctgtatgcaaggcactctgtgtccagtgctcagtctgggggaggtcactcctctgaatggttcagccacctgcccagggtcaaatagctgggagtcagacaaaggcgccaaggccagaggtggtggtcatgatgcctcagaagggaggttaggtccctttgggtccattttacaggtaggaaaactgagtctctgagtcaaggctggatagaggcagagtgttgggctggtaatcctgtttcctgatgatgagagctatggtggggcaggctgggggtgggacaggggtggttgggggtagcgggggccccagcatctctcttctctccaccaggctcagtgtcaaggtggcctcctcctttacccatgcctttgacgtaagttcctgggagggtgaggggcttggcagtgatgagagtcttcaggtgtggcatggaaagggggtggccatgagtcatgggccatatgactgagctgacctcaggactgggatcctccccaattaagccagagtgggcaaatatcagggcgggtgtgcgtgagagagagcagggggtgtgggcagtggggagagagagagagaaacagtgatcatcttaggaaagtgaatctcatgatcttccacggtcttggaacctcacaaagttgtggacatctagaacctcacaagggtccatcattctggaacttctcccaagtaataaatttcccgaactcagcaagttccatttcagagctcacagagccccgaggttcctgcttcttacagagttctgaggttctggaatctcaccatgggctcaggttctagaacattctcagagtccctaaactgacaggaatctaaggtcagaccccatagactggagctgggcacatttccttccctctttcttaggcactgcccacctccagccccaacagagtcttataggaaggcacttcttccaagctcatggggcctggggtaaagccagcctaaatcacagaatctctttcgaggtcactggtggacagcccaggccacccccaagtgcccagtgcctgccaggagctgtgtcctcaggcttgggggaggctgaggcagctgggcccctgggtttctctccctgggaacgggatgctgctgcctgtaaagccacaccccagagcaccacccccaccaccctgtgtgttctgttgcagggatcgcgtttagaagaatggctcagccatgtggtcggggcagtgtatgcaccaaagcttaacggtatggcaggttttgctctcttggacacatggagtgtctgaatttggtattgtctagtctgttgcctctctttatggttctgatggggacactgaggccagagagagaggtcgatcctcatttgcaagatgcagaaactgaggcaccaatttttccatttaaatgacattgattagcacctacatcttgccagcctatggacttcaagcgctgatctgacctcagtcctgccttaagctcccacagtctagtaggaaataatcatataaacaaatgattagaatatagatgacccagagtgtgtaagggattgatgaagcctttaggaggcttgacacgggggcaccactgacacaatacagaatagggacatttttgtttgggtgtaggaggatgagtaggagtttgccaataagaagctgattctgtgagaagagaactggctggctagtgaaagtgatggaatagggtcagcagggtccgagggttcctagggtccaagagctccccaccaatgtacctttgttttcaacgattctcttttcacagtggccctggatgttggaattcccctgcctaaggttcttaatatcaatttttccaattcagttctggagatcgtagaggtgagccttctctgcagatacggcccaggtgggccttaagcttgtctctggaaagctctgcttgaaactaatgaggggaatgctttgcttcatcctcttgtctgtccctgatccattttctaaatttctcagtgagttacaaattgcctaacttaggaatggcaaatatatgacatgtgtgctactactcctccatttcttgcccatggcagacatcatcaatcaatcacggagttctttcccattggattcagagacatgtctggcctctagaatggaacctaagattcactcacagaatcacagttcccctggtccaacagcaacaaatacatatgccatctctcccttatcttgtgtctgcagcagatatgaccaatggatcatgaccctttttcttgtggaatattgatatggcctcacaatccttttcaaaccagcccaactttgggtggtggaatagctctaggaggtgggcagagcagagagttctgtacccatttctcagatgaggaccaaggctgaagtaggtcagatttctggcccaagttcaccagtaaattaatagcagaaatggcagttgaacttgagtctattaagtcctcaagtcagagcctgtcccacactggatgtcattttttcatcattcatttattcatttaatgagtgcctgctgtgttccaggtacagggccaatcccagggcaggggagtaaagatggctgcagggatggggcattgcagagactcaggggtgtaaccaagagcggttgttccttacagaatgctgttgtgctgaccgtggcatcctgaggctgagacatggccaccagccttccctgttgactactagagaccacctgtctactctgcctcaatttccctcccagtctctagctgatgttggtgacagtaaaaatgccctctggccctgaagcactactccaagtttggggtgggaactgcctggctaatcatagaactgcctcagagagagctctggggcctcagtagcaaaccctgagctttcaataaatgactcctgtatctcggtatctcctggctggtttattccccagtcacgtaggacttgacttggcctttgcctccagtgccctccttagctccaggtaggagcttctgggaggtgaggggactcagggccttgtcattgtagctttgagtcccaaactgaccttgttggcctgggcagcctctgtgtcctgttctgccttcctctctgtccctgccccccttgcctccagctctctctctctctctttctctaaatacttctacttttcactctctctctctctgagtctgcatttttctctgtttctgactttgggatgcttatcagaagtgacatctgagctgaattttgaagggagaataggagctttccaggaaacaaaggcactagcaccccaggaagcaaggatgagtgagacttgttcttgccctgtggtgtgggggggtccctattggctgcacatcagacatggacacagctcagaacagagctgtgccaaacgctcttggtgcagatggggagactgaagccagagcagggcttggctggccctggtccacacagcggcagagttgggatgagagactaggggtcctgcctctaggtcctgggcttctccccactgcttacgatgggcacctttggtgaaaaatatccccaagttggcacttacagatggcctgagtgaagaagtgccaaccaagttttgataactggctcagaggatttgaggctaggcaataggtaggggagacttggagctcatctgaagatttatccacaactcattcattcagccgaccagccagccagccagcctcccatccatccatccatccatccatccatccatccatccatccatcccccctcccatccagcctcccatccatccatccactcaccctcccatttagcctcctattcaaccattcatccaccctcccatccaactttctacccatccattattctatccacccacccacccattctcccatccatccatccatccatctatccatccatccatctatccatctatccatctatccatccgtccatccactcatgcatgcatccatccattcatgcatccatccatccatccatccatgcatccatccatcttccccccttcttccttgcttcccttcctccttcccttcctctgtcccaccctcccttcccttttctcgtcctttcttttcattcatccaccctacatttattggtgcctgctacatgccagtgccgggtgacatgctcgggtttatcttcctgtgtctgatttccagacacttccagtgctactgattcccatcatggttaaatgagtggcttgagttagctgtccgtgttcaaatcccttcctggcttctggttagccatgtggcctcaggcaagtcatttcctctccctgagcctcagtttcttcatcagtaacttgaggatgttctattatggctttgaggattaaaccagcactcaggatggtgacccatctgtaagaagcccccagttccagttagctcttgttacggttgcattattctatctcctctccattcacagccccagctgtccctcctcatctctcacagggaacacccttccctgactcccacccttctctctttcatcccatccccctcctgcccatccttgacctcctttgaccgtctctcactgtcacagacagccctgcagtggctggattcctggcgccaacaggaaagcctccaagctccgaggtttggcatttaaggctgcctgtgacctggcctcagctgattcctcctggagcatgcagagggagcagagctgtctctgtgcctcgggctcctcgtctgcgaagtgggaatattatagtatttactcacgggtcatctagggatgaaaccagacaattcttgtaaagttctgagaagagtgcctggcacctggaaaacgagtaacaatgtgcagccaggcctttgcacggctcttccctcttcctggaacattccctctcctctcctccaagtgtgcctggcaaacccgtgccatccttcatacacaggacagcgcctccccgtgtggcagcagggcccagtattgtatgggccacactggtcactgcctcagtttcactctcccacttgcccaagagctcctcaaggtcagggacagtgtctgcttcatcatggtgagtcctgcagctgcagagagtagaggtgagagcagttaacctctgatgagtgcttactgtgtgctggatgctacgtcagatgcttagcatcccttagtgcacttaatttcacagcccccaggatgggtggatattatcatcctgttctacatataaggaaactgaagctcagagaaatggaatcagccagcttctaagtggcagaagcaggatttgaaccagatccctctgactcgaattccaaagtctgggctttcactgctatgccagaaagttcttgctgcatttattgcatgcttactaagtgccagacactgttctaagtgctttaggtacgtcatgtcatcagcttcttgaatcaggcctgctttctaggaactgtcttcaccttcattatacagttgaggaaaccgaggcatagagaagttaagtggtatgctcaaggccacacagctaggtagtgacaagattgagatttgaacctagtacccagtctctgaccccctgcctctggaccccagtctctgaactccgcccttagggtgaggaatcaaacaagactgaagggagccccttgcagccctggagggctgacagttcatggcaggggggcaagggctgagtggagttttggtggtgggtctgatctgttttctaatctcagcagccccagtgtgaccccctggctcctgtgtggctgagtcaccttggaggtgagtcacctcccagggaatctggatgtccttccagccgtcccccactaggtccttccagctccagacaaaggtaccttttggaagctaagcccaggtgatctccccggcgccagggctgccctaatcctctcagggtggccaggaaggacccaggggacaggctggcctgaggactgagaatgggcacagaaccttgggtgactggcaccaccttcatgtgtgcacctccctctacagtttatagtgtgcattggttcctgccctcttaggagtggggaaaggcacagttgccctctttgcattgtattccatttaaaactgtcatatatttgtatcacaaacatttttatcacacttactaagtgccaggcaatggggaaccacaacgactttaaacagggaagacccaggagctgagttactcagatgagtagcatcattttgaaatgtcctttctagtttccccattttacaggggtgcagactgaggcactgagaaagagtcattgtcacaagtttatgctgctagcaggctgggcagaacttacccctactcagtgtctgctttcatcaagggaaactaaagggggctgctgtttacggagctccgaggctccagggacattccacacatttcctatgtaactctcaaaaccctcctgggaaagtgtaattatgcccattttgcaggtggccagacggtggccagggagaagtgattgttgaggctaaaagggcagatgaatgtgggaacgcaggagtgtgtgactcttggagtccctatttcccattccaggaacccctccagcccgcacaggaggcaatgaggtggtctgggctgaagctacttcctcatgcccctcatcgccctccagacttgctgccgtgtgggacccaggatgataaggacgtaaatgccactcgctgagcccagctgtgtgcaaggccctgttcccagagctttgcaggtcaggacagttccaatcacaatcttacaaccaaggaaacagggagaactggcagcagaagtcaagcccagcagccagctctggagcctgtgctcttaacggttccatcaatgcacccactgcagatggggaaactgagttccaaggtgggactggcccagtggcacagaagtgaggggtgacatcggttgagcttggcaggacttatatcaatgacgcctgccttagagtccccactgcctccagggaggaaggaggaggcatctccttggggagtcaggggcaaaacacgtttattcccagtttgacttgaaagcaggccttggtggagacagaaatgtctcctgcctctcagaattcacagacgggcagggttggagcagggaggaggtggcattgattaaacatggaggtaggacctgggttggggctatggggtgggaagatagggagcactttgtccagtggagagcgaaagatgagttaattaattcattcacttgttcatttgttacactggcatctatgcctgtgctggcctaggagtggggcacatagctggttcgcctggagaaacaacacttcactatgggccccagggatctctggatgggccagaggaactgtaggggctgggggaagcttcctgcagctgcttacctttcacccttagaatctggagagggctttgtagacagcagggactgcacatgcaaaggcccagaggcagggagcacagggggtgatgaggaggggatggaaggaatgagtagctctgtgtgaagagaggactgggatgtgtgtacggaaggccttggatgccaagtgaagtggtctgggctgtgtcccagcaggttttggagggtgcaactgggaaaaggcagacggaacattctggggtggtggaaatgttctatattgtgataggagtgtgggctgcatgaccgtaaaaaatggtcaaaactcagcaaatgaacatttaagatttgtgcatgtcactgtatttaaagatataaagaaaagaatctgaatgccatgcagggtgaagtgtttagtggtagtatactgatgtctgcaactttcaaatgcataaaaaataaaagatggactaacagatggatgcaaatatgacaagaatgtaaatggtgggtatagttggtgggaacaacgtgacaaccatgtgtgtccgctgtacatttccttcacctttgctataggtatgaaaatttcatgaggaaatagttgggaaaaaccttgttgtatctcatacatagtaaacactcaataaacagcagctattgttattactttgggactattatttcagacccctaagaaatgagtgaggaatatttttcagataaaaaaaatgcacattcgtgcaccagtcccaagtttgaggagctggattcatattcgtctcctttagtcctaaaatcagccctgtgaggcaggtattatactcatttgccagatggaaagaatgtgaggctcagaggagggaagtggctggcccaaggtcatacggtgagttgggggttgagcagggtttgaacctgggtcatcctgatgctgagtccagcctgggcacctcctgtctacccagatcatctggaatggctagtgcctgccttagagttagaaactagatgcatctgggggtgattccagttccccaagcttgaggcctagctggggtctctgggaatgtgcccagcccaagggctgataaaacccagctcatgtgacaccatctggggctgagtgcaagtcttggaattagccacaaaccgcaaacctttatggttttggggctcaatgcccaatttgcagagcaaatctgaattccggtctcttgtaattacacagtgtttccctctctggggtctgggctcagcctcaggctgctatataagactgatctgtgaccagactcagccaaaagcagaggggctggggaacaggacttctcaagactcagcggcagggacctcctaggggtaaggaggcgcaccttgtctactcagtgtccggcaggggaggcacaggcctgggaaggtaataaggagagagagtcccagcctggagatccatcaggatggcccctctccaagttcaggggtcttgtctgtagcatgggcctagtcaggagagcctcttgggaatcagcaaaaaggcctgggttatgccaattacatgcatgcgcagagctgcactcatctttcccagggacgttgggtaccgagggcctttgctacctcctggagactcctcagctgtttgctgatgccagaaatcttccatcggtgcccatctttttaactgaaaggggtgattcctttttgaacacagctctctggaaagtgaggttaggatgaggtgaggaagccagaaaaaaattattgcatatagtagtcctttatattctagtgtaaatgaatgcctctaatattcttctgggagcagataggagtagggaaagaatttgggggcgctgtgaagtccaagagaaatggggacagaaaaaagaggagagtgtgcctaaacaaaggtggctgaaaccaacaatttcttggctcagatgagaggccatgccctgtgctgactctctgaggttggtggatgtgtagccggggctgatggagtgagagaagtggatgagggcacaaaaggagcaaaagaaagtttcccagaggctatgcagctcgttccaaaatgcatgtttcacctccccaatctcataacattcctcacccacttcttaggggtctgaaataacagtcccaaagtaataacaatagctgctctttattgagtgtctactatgtatgagatacaacttgtttgtgatttgggagcagaagttcaaaaaggtaaagtccctttcctaagcattaagacccagatatctctgacctagagccattaatattaaccacgtggtgtagaactgactcctccaaagagatgggaagagtgtttgctggtgagctggatgtgtggaagggtggctagatgaatgcattgatgagtagataaactgatggaaagatgaatggatggatggatggatagctgggtggatggatggttggttggatagatggatgggcaggaggatatatggcttgccagctgtttggatgacagatggatgatagatatatgggaagatggatggatggtgggatgggtggacagattaataaatagagggaggagaatgagttgatgagtggatggatggttggttggatggatggttggttggatggatagatatatggcttgctgggtgtttccatgacagatgggtaatagatagatggaaagatagtaggttgaatgtatgggtgaataggagaataaatacgaaggggagaatgagtagatgagtagatgggtgagtgatgtagaggaatgagtagatgagtagatgggtagatgctggagagagttccttagaacctgcgagctcccagtttggtgtttttgttggaatccctattacccatctccctgatgctcaatttgtcaattccatcttgggagataattagacatccattctctgaaacagtgtgtttaatgggtctgctttgtgtcaccagattcatttcaatttgaaaaactcaaaaggtagtatctggaattctggaccctgccttagtatgtgaccttggctggtttcccctctctctgggtcccagggtcctgagatgactcttggctggggctgcctagtgctacctgctggccagggtggtggcgcccagccacatctgcatctgcactttctcctccacagggaagcagtgccagcatgtggatggcctggtgtgtggctgcgctgtctgtggtggctgtgtgtggcaccagccacgagacaaacacggtcctcagggtgacgaaagatgtgttgagcaatggtgagtccagccccaaaggggtgagggttggcatggggtgagcagggcagctctgccaactctgaagtacccaggaacctcctcctgctagcagagttcacatcgggaggctgggtgaattctactctctgggccttagtttctcctttttcttttgactaccatttcctgagcacctactatgtgccaagcaccatactggtgactttatgctcattctttagaggcaatagagaacaatgattaagagccctggatcagccttcgtggggttcaaatcctgactgtgtgaccttaagttcatgacttgagttccctgagcctcagtttctttatctgtaaaatgggtgtaattatagtctctatctcagagaactgatatgagaatgaaatgaaatgaccttttgaaaacttagcacagctcctgggacttagaaggccctcaaaagtgggagctataattattcttgcctccaattcttaggaccttgcttttgtcatctagcatgtgaggacatactttctccctcaacacccatcccaggctatcatgagcataaaaaaatgagattatttcctatttaagtgatctctgagtacctcacaggcctcaatctttctatccatcagacgggtacacttctggccttgactatttcccaagaatcagttgcgataatacataagaaagtttattttattttattttattttatttgagacggagtttcgctcttgttgcccaggctggagtgcaatggtgcgatctcggcttactgcaacctcctcctccccgtttcaagcgattctcctgcctcagcctcctgagtagctgggattacaggtgcccaccaccacacctggctaatttttgtatttttagtagagacggggtttcaccatcttggccaggctggtctctaactcctgacctcataatccaccctcctcagcctctcaaagtgctgggattacaggcatgagccaccacgcccgtcctgaagtcaattttttaaagctgtaaagtgcagagcacttagaagggagggcgatgaagaaaatccatgaagggctggctgatgtccaaatctagttaaagtaagaccagacaaaacccagcagaaaatgagctggccaggatgccagggctagatcagcctggagaagtcatcccgttcagcctctgctcttcgctggtgggaaaagtgaggcccagggagctgagcaacactgcgaggtgctgcctgggggctggaggtggaaaaaagggaggaaccctggactgatgcccttgcctctctgcagccatttcaggcatgctgcagcaaagtgatgctctccactcggccctgagagaggtgcccttgggtaaagcccgtggtgatggtggtgggcctctcctgggcggtctgcttggtggaagtggaagtggaggtggtgggggaggtggtctcctggggggcctgcttggtggtgggggtggagggggtggcagtgatctgttgggtggaggcttactgggtggcagtggcagcagtggtggggagttgctgggtggaggaggtggcagtggtggggggttgctgggtggcagtggtggggggctgctgggtggcagtggtggggggttgctgggtggcagtagaggggggctgctgggtggcagtggtggtggtcttttgggtggtggccgacaccattacaatgactacagacgcattgaattcccccgaggtgttggtgatattccctacaatgacttccatgtccgaggaccccccccagtatataccaacggcaaaaaacttgatggtatttaccagtatggtcacattgagaccaacgacaacactgctcagctggggggcaaataccgatatggtgagatccttgagtccgagggaagcatcagggacctccgaaacagtggctatcgcagtgccgagaatgcatatggaggccacaggggcctcgggcgatacagggcagcacctgtgggcaggcttcaccggcgagagctgcagcctggagaaatcccacctggagttgccactggggcggtgggcccaggtggtttgctgggcactggaggcatgctggcagctgatggcatcctcgcaggccaaggtggcctgctcggcggaggtggtctccttggtgatggaggacttcttggaggagggggtgtcctgggcgtgctcggcgagggtggcatcctcagcactgtgcaaggcatcacggggtaaggaggggacgggttctccccagaaagcccccatacacctccaaatgggggtgatcactccctgaagctggggttgccggagggaaggtcttcagagccccacacacttcagggtttggcctcaggattggaagttttaagacccccaagttacatggtttgggtcttggcatgaaacagtcctaagtttgagacccagttcagcttttcatgtttgcgtgtgactttgggccattgatatcatctctcgagtctcagtttcctcatctgtagaatggtcatagtaatacagtgtagtggaaaagaccccaaggatttaaaaactatacatatatatcataagttctatgctcagcctgttcctcatagtcgatgtttaatttaacaaatatttaaagctcctgctatgtgcagagtactgtgttggcactggggacatgacccaatggtaagccaagaaaagacacattctctgtctccacggagcttgcaggttgatagggtacatgggcattgataagaagcctaaacataaccatgcagtttcaacagtggcaagaagttcatggagaagtaagaatctctataacggggcagctcacctacctagggaggtcaagggaggcttcctggaggaagaggaccttaagttgaaatctgaagaatgtataggagggaattaagcaggaggaacctatatgtataggagggaaccaggcaagaggggcagggatgagcagagagagggaatggcatcttgacatgcagaaaagattcaaaggaaatatacggaatgcacacagtgggcctctgggcattgggattacaggtcatggcatttttgccttaatttctctgttttccacattctgtccttgaactgcaggtgtctagtgtctttagagtcagaaggaacagacggggagcagagaaagggggtgtaggggagggcgctcgggtgagtgggtggtagttggggtggccggccttctcaccactctgtgtcccgagcaggctgcgtatcgtggagctgaccctccctcgggtgtccgtgcggctcctgcccggcgtgggtgtctacctgagcttgtacacccgtgtggccatcaacgggaagaggtgcgtgcccttggccctggaggggtccccaccaccctatggcccaacctctgtatccataacacagaggctaggaagacctaaacttctgccagtgcatgcccacagacttgcaccagaggccatctgtcagcggtgaaaacagcctagcacagtggttaagatctgggaggctgggctgggagtggtggctcatgcctgtcatcccagcactttgggaagccgaggcaggcagatcatctgaggtcaggagttcgagaccagcctggccaacatggtgaaaccccgtctctactaaaaatacaaaaatgggctgggcgtggtggcaggtgcctgtagtcccagctacttgggaggctgaggcaggagaatcgcttgaacccaggaggcggaggttgcagtgagctgagatcgtgccactgcactccagcctgggcaacaagagcaaaactccatctcaaaataaatacataaataaatctgggaggctggagtcaggtgacagcttgggttcaaatcctgattctctcataagctgtgtgaccttgggccagtcccccagtgtcactaaatcttagtgtcttcactggcaatgggataatgaggtcacccccttttccaggtgactgtggccgtaagtggggaaaggcaagcaaaatgcttcctggaatagggccttccatgcactaggtgctgactagaggacctcagagggtgggcttctgtgtggacttatccccgtgggatgaggtcgtgtccaccaagctaggcaattgggagtcaccttggaaaccagaatgtgtgctgagccctgttcccagcctttgaagctcatgggctgagggggagatagacttgttcacgtgtgacttgagggaccagggaagagttctgggttgggttccttagagatgagcaaggagcgtagcagatggcagggacagcaaggacaggcctgggtaagggtgagctcctggcggctgggggtgactcatggtctccctggccccttggcctcctccagtcttattggcttcctggacatcgcagtagaagtgaacatcacagccaaggtccggctgaccatggaccgcacgggttatcctcggctggtcattgagcgatgtgacaccctcctagggggcatcaaagtcaagctgctgcgagggtgagtgctagccggcagtggagtgccttgggggttgctggaatggtctgtctttggcaaacaacatgacgtcacccacctgcccataggctctggggtgggcaggacgatgatgctgtggggtggtgagtactcatgctgagccagctgtactctcacctctgtccctgacctggcacatgcctgatgggaattcatggcctgcaccttcaaacccaggatggggccttcgaccagcctggaaaatatgtcatttgcgacacacattctttccagctttgaaaaggttttgatctgaatggtcaggagcatgcctgagactcacatctcagttccatggttcattgctgtgtgattttgggtagctctcttgccctctctgagctccagtttcctcctctgtgaaatgggtaattctttttccttcaggaattgagataaggaatggaaaacacttagtgatcagctgggatatcttgagagctgatgaacgtacgtccaacaggggttgtgtgcgttggtgccccagatcacaggggcattccccacttggttctgcccagttcaaacctggtgaggggatgagagttttcctatgacgtgctccttacaaaatgtccaagtctccatcctctggcgaagtggtgtcaagtgttcatatactggccagcacgctgtccccaggtggtgctcttggatgagtacacactcagagcggagtctctttctgttcactccctgccctcttctttggcttctctcttggaggcctctgtccccacttcttcctctccattattatccatcttttggcccagtccccccagcccttgaaactcattgtgcaacttgaaccccaaactttctgattcccgtgggcttcttggagactttacttctgcttcagagacgatggaggcaaagaaaatcagctcccagggtccaggcaaggagaggagggtgaggaaaaccatggaaacctcacagatttttaaattcacattttcactaggaaatagatatttggtattgcatggttcacaaacataaaataacaaaaaggcacagagcacagggcctcctcctatcccacctccctctgcctccctcccaccaagctcaccagttattcatctctcaattctccttccagtttctttgtacacatgaaacaaatatgaacatagattctcatcttccaccctccttttatgcaaaggggcacatactataaatactgttttgcactttgctttttttcatttaccctattgggagaattttctgcatccaaacatcgagagcttccttgtttaactttttacagctacgtaatattccattgcctggatgagccatctcttatttcgctggtcctctattgttggatataatttgcctgatcttgtgtcctgacaagtaaggtcacaatgaataaccttttacatatgtcatttcacaggagggtcgatgaacctgttggataatttcccagaagagaaaaagagtttatgccctgaatgtacataaaggaaagtccaactatcccctcaacacacacacacacacacacacacacacacacacacaagcatgcatgcatacacacacatatatattctcaaggcccttatcatctgaggagaggtggaaccaggataagcccgtcaaggtgaatccacttaaaagggggaccgaaatgcatagttagctttgggagaaatgttctaattagggctttatttcaagaaattctttgctttgctgaattggcgcagctctgaacagtcagccacaacctcagaagcgggaacccaggcagggttcggtggcgagggacggagtgaagttctcaagaggtccggcggtcagagacattttggtgtaggatgatcatgtttccttcgtcttcttatcactgcaggcccctggaaacaaattcttagaccaaaaatctgtctgcccatctatacatcttgtttatcgtcgattttcctccttaactaacagcttgggagggttagttaagagctgggtacagttatgtgcacctgtagtcccagatactcaggaggctgaggcaggaggatttcttgagcccgggagttcaaggctgcagtgagcggagattttaccactacactccagcctgggcaacaaactgagactctgtctcaaaaaaaaaaaaaaaagaaaagaaaaagaaaaagagctgcatggcttacttctgtggacctcagcctccttgtctgtaaaatggatcacctctcccaattgtttgagcaccaactatccatcctttcttgtggatcacatgagcacattttattggccagtatttctccttccctcccttccacaaacatttactgagtacctactatgtactagatcttgagtcagatgcttagataaataaacacgttcgttttccctttggaaacacaacataaggctgcagcaaatgacccatttgagggtcagatcagcagatgggaatgacttttgcagttgaaaatcagcaacattacagcctgggcctgacccattataaagctccagacactttgtttattgaatgaatgaatgcatgaattcatgaaaagccaaacaatttgcctgggtggcctgtctagtcagtccaaggtgaaggtactctgtcctcccagctttcgaacagttttccagcactcagaggttctcactgttcagagcctggactagtgacccacagggtggacagccttggtgagccccacatggctgcgagccttgacctcatcctgctcctgtctccttaggcttctccccaatctcgtggacaatttagtgaaccgagtcctggccgacgtcctccctgacttggtaagaagctgtcccagtatgggagcaaggggcacaggcttcccccagactgaggggccatagtccagcctccatccctgggggcctgcaggtaacccagagggacagagagagccaaggcctggggcatgtatttggagggtctggggaggaccctgaggaacacgaaaggacagattagtgaagggctaaggagagggaccttgagaattgcacagttccgggtttgaatcccggcttgggcacttcctagctgggtgccaagttgcatcatctttctgaacctcgattttcccatctgtaagtgggaattagagacagccttccccacagggctgtggtgaggagagtgcctggcacagagcaagcagtcagtaaattttagctatcgttactcttgcgtccccgactcccttgctcctactccctgcagcgtcaacaaggctttgtgccatttctcccctgcagctctgccccatcgtggatgtggtgctgggtcttgtcaatgaccagctgggcctcgtggattgtaagtccaatacactttctccagcctggggaaggcactgaggaccgggccctttctgggaggagggctcaatgtggtgggggccacagacctgcccttaggcccttgaagtgaggagtggctaatgccacaagggaggtgccacctggctttccctcttgctcccaaacaccccccccgagtaccagagggaggagcttccaccagggtctgggagtcaggggtctgggaagtgatggctctgtcctgggagtcaggggtctgggaggtaatggctcgtcctgggagccaggaagctgggtttgagccccggttctgccctggcagctgtgtggacttggagagactcttcccagttttctcatctctcaaatctctcaattcacagaggggttggagagtgactagcaggagacacactgtggagactgaccacggcctcagaaccaggctctaccaccatctcggaccctgatttctgagtgaacattcctgaaagcaagcccgccctgtatggctgtgccatttgtgcactgcaccattccagggacctcctttcacatggattacagtgcaatggcagtgcctcgagttgtgcagtgcacagcctccacagccacacagggcagccgtctctgatagtgttcccatttctctgggactctaggcagtttgagaatggctttccaagacagggaaatctccttccctttgtggccagagatgaggaaggaagagcccaaaagctggggctgttcattacacagtcaaggaaatgacagattcaactaagcaccacattgtggaaccctaaattccttccctggtgcacagcacttcacagtttacaaagctcatcaacatccaggatattgcacccccctgcccccaccaacgtagtcccagaggttacagtaaacccattttacagaggaggcaactgaggttcaaagaagtgcaatgacttgcttgggttcacacagcaaggaagaggcagagctgggattcaaacccagaacttttgctcttttcatggtgtctggagctggagcctgggcctaccttgtccatccccagccccagtgtatgaggagggaaggcatctggatggtgaggggacctccctgtgaccctctcctttgcctgcagctctgattcctctggggatattgggaagtgtccagtacaccttctccagcctcccgcttgtgaccggggaattcctggagctggacctcaacgtgagtgcctggggttcagggcaaagggtggtggccctcctcccaaaggcaggagtatcagtgaggccctcccagggcttctgctgaatgcctgggaagtaacacttgacaggaccctctcgattagaagaaggccttctaagagctgtgttagaaaacataatcatggccagcattccaaatgcttactgtgtgccaggcacattctgtgtgctttgtgtcgattaactcagcctatcttcacagcaaccatatgagggaggcacttcttattgaggaaactgagccacagaaaggttaaatcacttgcccaaggtcacacagctaataaatgtggacctggggtctgaacccaggcaatcgagctactaggtgctaaaagagctgctgctgtgggattgggtgtactggaggaataaatgtggccagaggtatgctggtaagcatttaaccatcatctctccatgattaaaaaaaagtcctgatttgtagcattggccaatatccatggtatcaaaactcccatcatggacagcttcaagttaccaacatgacgtcagtggatgcagagttgggaagagatgtgtgaaatctgaccatgtgaggtggtatgagctggctcctccagcactggcctgcatctggcccctaattttgtatggggcacgcacacatatgtactttccctaggcttcatgaacacagatgactccacacttgctccagcagatacagagatgcaggagtgcatccgtgctcccgtgtatacaggcgcccctgcgcatgcatatatatttccagcacctgtgcatgcacacctaatatattcataaacatacatctgttgaagagatattcattggtcacccgctgtatgcctgagctgaggctgagtgaggctctgggctgagtgctggaagtacagtgatgaacaagacaaagtctctgccctgatggagattagaatgttttggaggggacaggccataaagaatcactcaaacaaatatgcaattctaagtcatgagcacggtgatcaaggatccgaggctatcagagcctaaagcagggggtgtatgatccacccagggaagtcaaggagggcttcctggaggaggtaacacttgagctgagagctgccagatgagtggaacttaacaaaagaagaatgtggggaagggaatatcctgtgggaaggctccatggtgggggtagtggtgttgtggggagactgcaaaggccctggtggctgtgtagcgggaaggtgagagacagagtggcttggaggctggagaggtctcctggagcagatcacctagcaccttgtagaccgtggagaggagtctggtctttagagggtagatatgcattgtacagatgcatacatatgctagttcatcactgcagggctgagtttggagaggatctgtcataccatggctgtaattgtaagtgaccatgaagcaggaactgcgaaaggttccactgcatcataaactggaggagagtggggaccatgcatcaaagagccactcagactcagtgggtttaaccaaaaatggctgcctggaggcagattcagggcctcactccagccttcagtccccttctttccatcttctccctccctgtgacccctttcttctcttctcccccagacgctggttggggaggctggaggaggactcatcgactacccattggggtggccagctgtgtctcccaagccgatgccagagctgcctcccatgggtgacaacaccaagtcccagctggccatgtctgccaacttcctgggctcagtgctgactctactgcagaagcagcatgctctagacctggatatcaccaatggcatggtgagtcacagccccaccagggggaggtggctgggcagcagacagctgccagtgacccttctcagtctccacagacttggggaatttgctgtgaagtgagaactgcagatggtccaccccttgactcacctccagctcatgggtgtgcgtcaattacgtcagtacttgccaaagtggtgcttgggaggatttcaggtggtccacagaccaaatctcacgatgagaaagttgctccctattcaattttatttaactttatttcaattgttttttaaaagcataacatatattcacatatatgaacctcaatataaatgtttagaatgttttcatttggtaaacactaatacataagtaacaaaatgacacataacaaaatatcacccttaggcatgctccagtcattttctttccaaactttttcttttgaaaactttcaaggcttcagaaaagttgcaaaatgctacaactgatggacatatatccttcacttagatccactagttaaaattttgccacagttgcttcatatctacctatgcgtccattcaccctcctacccacccactcctccacccatcaacccacctatccacccacccattcatccacccatacatccatctatttatttatccatccacccatccacccaccctcccattcatttgtatatccatctatttatccaccagtccttccatctatctatccagccatccagccatccatccacccacccacccatccaccaatcaaaccatccacccattcatccaccaattcatccatctatccatccatctgtttatctatccatccacctatccacccactcacccacccatccaccgtcaactcattcatccatccactcatcaacccacccatccttccatcaacccatccatctatccagccatccacctatccactcacccacccacccatccaccatcaacccatccatccatctactcatcaacccgaccatccatccatcaacccatccatctatccatccatccacctatccactcactcacccacccatttacccatcaacccactcatccatatccactaatccatccacctatccatctatccatttatctatccatccacccacccatccacccatctatccacccatttatgcattccttcacaattcatccatccatccatccatccatccatccaccaatccatccatccatttatatatccatccacccactcacccattatcaatctatctgtctgatctgtctgtctgtctctctgtctgtctccctgtctgtctatccatctatcttatctgtttttgagcaatttgagctttcgcagacatcatgacaattcattccataaacttcactgtatatctcctaagaacaagacattctgcacaaaaccatcatacaaatgatgccaacacttgcttccattaagagaaaagtctccacttggtgtccgtatatagttagccctctcttgcacttgtcgttgtccccttttaaactaagagagaacagagctcatgcccaaagctctccacagacaatgatatccatgcagaaggtaatggcattattttgtttttattgtatttggttttacagttgccatctctttgtgtcaagtggtactggctttccattttgagtatttgaggtcttaagaagcaagccaatttaaaaatgctaagtaaataatagtacaggtggttcaaggatatgacagaggtcatgaatttagtggacactgagttatgcaaatggacttgatgctggtctccttgttttaataaggaatgacatttgtttcttttctttttctttctttcttttttttttttttgagacagaatcttgctctgtcacccaggctgtagtgcagtgttgtgatgttggctcactgcaacctccatctcctgggttcaagcaattctcctgcctcagcctcccaagtagctgggattacaggcatgtgccatcatgcccggctaatttttgtatttttagtagaggcgggattttcaccatgttggccaggctggtctcaaactcctgatctgaagtgatccacctgcctcggcctcccaaagtgctgggattacaggcatgagccaccgttctcgcccaagaataacatttttagaggagaaatattcaggttttgcctgctgttctttgaaacactccttggtcagcttaagtcagcccaggtcacttaaccacaaactggctacggtgatctgcgtatggtgatgatggctgggtaggcaggacttccccaggggtctttcagggagagaagacgaagacgccctgctgggtgttgtaaagcatgtaggagtttaatcactgtattagcaactcctgtctgtaccgatagcctccaggattcacgtggcccttcttcttgtcctatagtttgaagagcttcctccacttaccacagccacactgggagccctgatccccaaggtatgtaaggtgggcaggtcccattgccttcagcctcattctctatcttgtttgagaaactggattggaagggaagatgctcagcgctggggtggggtgctctcccccgaacccctgcttgggagtgcagtgacagtgacaagggcttgcaggctagacccccatgggtgggggcgggggaagacacagagggttgaggtggaaagaccctgaattctataggtggtccagcctgcataggcctaatcctagcctggccacttcccttgctgtgtgactttggagaagagtcttaacatctctgagccttagcttcctcatctgtcaaaaaaggctgctgatacctattccataggttatcataggaaggtaaatgagatgatgcatgtaaaggtgtcaacgcgggccaggcacactcgggtgcacagctgcttagagggaaaagccaggcctttggaacagacagacatgagtcagcacatcccagtcatatgaccttagatgcacaattcctctctctgagcctcagttttctcatctggaaaacggggtaaccatgctcacttcagagggtggctgtggacctggagtctgcaccaaggcaaggagcaggcatttgatcaacatgaactattattgctgttgttaataattacacattacttctttttttaaaaaaaagcaagtgtgcttttgtccaattagtgaccatatagagttggaacaaaggcctttcccaccccagttctggtcccatgtctggttctgggcctattaccttgcacctggaagcaaagggctctgtacctagtaagtgttatgcaggtgtgaatgatggctgcaatctatagccattttagacatttttcacctcttttctgcctgccctgtttagtcctgggtggaattcaaaggctctagggggagaacaaactcaacacgtggtcactattgccctcatgtggctgcaaattgaacatcggaaggatcattctctagggtggtaacagtggcagctccagccagcaggtggacccctcaatcaactggaccttttatttactgggtcacttcctatgtgcactgcactttacagcttatgaaattgttttttagagtatactttttctttctttttttgagacagagtcttgctgcgttgcctaggctggagtgcagtggcacaatctcagctcactgcaaactctgcctccctggttcaagcaattcccctgactcagcctcctgagtagctgggactacaggcatgcaccaccatgcctggctaattttatattttgagtagagacagtatttcgccatgttgaccaggctggtctcgaactcctgacctcaagtgatctgcccacctcggcctcccaaagtgctgggagtacaggcatgagccacagtgcccagtcagaatatactttttcaattggttctgatcattccctctatccacaggaccaaagaggagaagcacaccatttacagatggggaaacagaggctcagagaggtcacatgatgaggcagtagcagagctggggtagaatagggactgagtcctcagtggcgctgggactgcagcaggggggattcaggctggacccagcaatgtgtcctggagacctgggctgcacggagtcaccaggggaggggacttctttctgtttcttttgaaagtaatattgtggttttgcccatttctctatggtcagttaacatatttaagaagtatattccttaaagtatgtatttttggtaagtcaatcatttgataaatatggcaaactgccattttatgaattgtccctttagtaaattagctttcagggaatcaaactgcagcaaacaagctcaagtccctccagcaatccgggctcgggggcagcctgtgccttgcctgggacctccctgtgggattccccaggcgtggacttctcatttcaggaacagtgttcagaggcattgggaggctctgggctctgagcccacagacatgcactggaatcttaactttcctcctggccttggacaatttccttggcattcccctctgaggccctgttttctcatctgtaatgtggagaaaaaaaaataccccatgggttgttgtaatgactgaatgaaattaagactgtccattcagcacctggccagcatctctgggagaccccatttcactcagtaccaagttttaagcatttccaggtgtcaggcattgagcctgaattttgccggcatgatcacagttatttctcatagtaaccccatgtgcaaggcttggagagggcagctccttgcccagttctcacagtgggtcattggctttgcctgtggtttgttggactcaagcaacatgagaccccggtgctctgtgtttagaggttggctgataaccccctgggtacctcctatgctaagggccctgtccatctggcctggtgcctgcccacaggtgttccagcagtaccccgagtcctgcccacttatcatcaggatccaggtgctgaacccaccatctgtgatgctgcagaaggacaaagcgctggtgaaggtgttggccactgccgaggtcatggtctcccagcccaaagacctggagactaccatctgcctcattgacgtggtgagtgtctggaggtactggtggcctccagctgggcctcaagacagagccacatggtctcctggagcccaaagaccccttcaaatcccctcaatctccaccatcatgactatgggcccaactttggggccagaggctctaacccaaatctagcctttaccacttccagctacatgactttggacaagtcactccctatctctagactagaatcttaactctcttgctggccttgcacaatttgcttggcatttccttctgagccccagttttctcatctgtaacatggagaaaaaataccacatggggttgtcgtgatgactgaatgaaattaagactgattttctcctctgccacagggggatggcagtagggcattagtaagatgctcagagcagtgcctgacataccctaaaggctgccaaagtgttagctgatattattctcacaggttgcctatacccagtgtgtggccaagccagtcttgatcattcattcagcaatatttattgagcacctactatgtgttatgctttctacttgacactggggaaaggggaaacgagacagatggtgcctgctctcttgtacctggtacctagcaggggacagatacaaatacaacaattttcacaattatttcatagaaaggaatcctcttaaaatgtgaaccatggccaggcatggtggctcacacttgagaacccagctctttgagaggctgaggtgggtggatcacttgaggccaggatttcgagaccagccttgtcaacatggtgaaactctgcctctactaaaaatacaaaaatcagctggatgtggtggcacacacctgtagtcccagctactcgggaggctgaggcacgagaatcgcttgaacctgggaggcggaggctgcagtgagccgagatcgcaccactgcactccagcccgggtgacagagcaagactccatctcaaaaaaaaaaaaaaaaaaatgaaccatgtttctcctctgcattccttcaattctgaaataaaagcccatctcctgacaatggcccacaaagtcctcatgaccatcccctcatcacctctgagctcctcagtgttcctccaacatgtcaggcactgtctgacctcagggcctttgcagatgctgttccctctgcctgggatgctcttcccccaggtatctgcacagttactcccttacttcctttttttttttttttctttgagatggagtctcactctgtggtgagaccctaggctacggtctagcttagggcccagcacacagtagatgctcagtaaacattggtcacaggaatgtgttaagctgtgttaaatgccatttctccctccatgattaaggcttcaggctttggaactcagacacttgggactctggtcccatctgctgtcttcctgctagtccctcctactcccaaagcttgagaccaaataagccacttctagttgggaattaggtgctctaggctggagcatgccaagccacagagtgtgggggttcttgtgtgggccttataagatggtcgattaaagggtcgattctagcccacgagtgggaatggctgtcccaatctgtcctccatcaatcagcctctactgtgtggagattttccatcagcagctcagaggtttgtgtgagccagcccagcaccctgcagtgactcctgctgtcccagggatgcagccctgactcctccccagcgcacagctctgcctggcttggtcccttttcactgcagcctcacgaacccttttacctccttgctctctggcctcctctctacctctctaatgccaacctcttccctgcctcctggcctttgcccatgccctccccactgcctggattactctcccaccctcttttcatctggccaagtcctacatacccttcagtcctcagtccaaacaccatttcccacaccagcttacacccctggcacgtgcacccagagcccccagttcttcatcaggccagtcatcgtggtcattgttatctactaacatcacctgaatttctcaggagcttactgttttttcataaagccaacttttaaattcaatttattttgggtgggaggcagggaaggaaaaagggattttcctacaaaaaggcctctacttggagagagagagagagatgagcctgggccttttatatcctctcctggggatgggacagttatgattggcagcggtgatgcccaatctcgtcatctaaagtgagtttcataggctacgagccactccccacccactccgaggcattgcagagacacctggtaaacaccctctataaatcatggggatcctgtgactgttgccttactgagaagtgttcactcagcccttactgtgactcacttgcaaacgatagttaatgttggcaacttattattccgaactccttccctccagaggtggtgcaaatccagtacatggtgagtgttaaccaggagtctcatgcttataaaaggaggtctgacccaggcctcggggaacaacctgccatcatgctcagggttaacgaagccctagctagcactgggcacacaatgagcctttggcaagcactggccaagacatgaaggcagtgacgtctttctcctttcctttccctccaggacacagaattcttggcctcattttccacagaaggagataagctcatgattgatgccaagctggagaagtaaggggctatgctgccttggggtcctgacggtgctggtgctgctcatggaggagccaccagggagcgggtagaggtctcctgtgtggccatcagggctgggtaaacccaaggggctgcaaaggtgacgatggctcatgcctaccattaccactgtcacaagccaggcaaggtgggtgaagccgtgaacttagaaagaaactactgccaaaatcaacagtcagtaataatgatgctggggtgtgggcacagtagcccatgcctgtagtctcagtgctttgggaggccgaggctggaggactgattgaggccaggagtttgagaccagactgagaaacatagcaagacaccatctctacaaaaatagaaaaattagctgggcataggtacacacgtgtagtcctagaaaaaattagccgggcttggtatccatgtgcctgtaatcccagctactcaggaggctgaggcaggagcccaggagcttgaggttgtggtgagctatgattgtgccactgcactccagcctgggcaacagagcaagaccctgtctctaagtaacagtgatgatgatgaggaggaggacgaggaggaggaggaggatgctggtgatgatgacataccaggctctgctctatgtacttgaagtgtacgtattatcttgtttctcccctctgatggtcccagtggaagtcagggctattattctccctttgtagggagaaaactagggctggaaacagtggatttacttacccagggccacccagcaagtacatagaggggctgtgagccaacccaggttcatgtgacctgctgcattggatgggtacaatcatgcgctttggagccaagcaatatgggttcaaatcctgatgtgaccactgactgactgtgtgatattggccaaccaacttcactctgagcctcagttttctcatctgaaaatggggataatagtcactacctcgtaagattcataaaaagaataattattattcattggatgctttccgtgtgccaggtatttggctaagtcctaggtgtgtcttcatttaattctttctttttcttttcttttgagccaggagctcgctctgttgcccaggctagagtacagtcacggctcactgcagccttgacctccccagctcaagcgatcctcctacctcagcctcccaagtagctgagattacaggcatgcaccaccacgccagactaatttttatatttctagtagagacggggtttcgccatgttggccagcctggtcttgaactcctgggctcaagtgatctgcctgcctcggcctcccaaagttctgggattatgggcatgagccactgcacccggccttcctttaattcttgatataagcctatggaaataagtactatcattatttccatttcaagattaaatgaggtcatatgtaaaatttttagcatgtgactagatcattgtaagcttttcttttacaaccaatatttcttaagcccaccaatggcagttactcgtgattaatatagtgcacatcagagacatccaggagttcccaaggaggcaagattcagcctgcagcctggataaggagtaggggccagctgggcaagagctgggtatttcctgcagggagagcagcatgggcaagcttcgcagagaggaaaagggcacggatactgtggggtgcggtgcctgagagggagagaggctgggtaaggaagtcaggaaggaagaaaacatgtcccaagcggagagtcttgtttccttagaaggtacctttatttccctcctgctggacaccgagctgatgcttctgaacagccccgaacgatttccgccccacgggcaagcccggtctggcctctctcgggtaggactgtcagctgtattgagattcaggtgcagcaagacggaggcccttatagagcagagcgagacctcaaaccccggcctcagcctcccatctcagaacagcacaacagtgagagtgcaggttcagggtgcgaggcctaggctatccctccctggctctgtggctgcagtaaattaccctggagcctgctccactggagggctggaaggattacacgaggtgatggtgatcactcatgcacctatggcagggctctggagcagcgctttatgggaatatcccctttagtcctagcagccacccactttgcagatgaagaaactgaggcatagaaaggtaaagtaccttgactaaggtcacaaagctagtaggtggcaaagctatgatttgagccttctccgtgtggtgcatgaagcccttagcatggtgtccgacgtgtagttagcgctcagcatgtgagagccagcattgttcttattaaatccctgcaggtggagagtgatcgtgaggatagtggaggggcttctcacaatttgttgcaatgcaagagccttatgattttcaggcaatccctgcttctcacaggctgttttcttcgtctacaggaccagcctcaacctcagaacctcaaacgtgggcaactttgatgtaagtaccatgtttagttcccagggcaagatcttctgggaaggagcccaggacgtgtcttccgggaatggtgttcctgtgaggctggctgggcatggggagtttgtgaattccaaagtgctcccgtcaacactatcagccctcattttgcagatggacagatgtagaaactgaggcccacaaggcaagtgaggggcagaggacagactcacagctccttctactctgcctcgggtgctgtcccatgttaactggctgccccatggggggccacttggcccaaatcgctccatttcagggtggggaggcacagtgggcagccttgtcctacaggaccactttccttctggagttaggagcccactgactcctgtgtgaccttgagcgatatcaacccactctgagcctcagtttccccatctgtaaaatgaatacaatttgagttcatttctaacctcccttcttgcccctgggttgtggaattctgcttttccaagggtccagaaatctgagatgctcacattctagcgttgggtcctgttttatctctttgttcactcttgggtgccccacccccacctaaggcttcagaaacactccttcctccccacccccccacctccgctttttataaattgacaactaagcatctgctagctttctgggacaagcttggatgagatctccacatgtgcagaaaaagtcaaacccattcattgtgttgctaattttatagcttttctaacccaaaaagctacagcctgtgaagccgatcttgccagcttcattttataaggataaactgcccaaggcttcccagctggttggggcagagttgggattagaactgaaatctctggactccaagtgaagaaaggggctgacagtgtaaaattaatgaattaatgaagctatcgagatgggccctaggcactgaattatgcttttttttctcttttaatgaggttttctcatttaatccttaccaccgtgttatgatttgggtattattattacacccattcttccaaataaggaaggtaagctcaagtgacttgcccaaggcaacagagctaggaagaggcactgccggaaagtgagtccatgccctcaccctctgcagactggaacatcaggcatgttacatataggggcttatgtctgatttttataaccaccctatgaggcaagggttactcactcctgttttcagatgtggaaaccaaggcttagagaagttaagggaggtaacatatgaaaaggctcaaggccaggagttttacgtgatctacccaccatcctcaccgcatccttgcaaactcagctcactgacccattttacagctgaggaagctgagggttagagaggtgaaggagcctgcccagaggcccacggagactgagctgggatgggaacctggggtgttggctccagggccattgggacttctgtgatgccatgacagtgccatcggggccaggccaccctgaaacctgtgctctgtgcctcccaggggaggaactaggcctccctcaatccctgcttcataggggccttgggccaccacccatgctgggcctcagtctgcccatctgcacaatgtgcaagttgatggggggcaccttaaggctgccggtgagaaattctggggtctcaggggttctgactgccagaacctagactctcccagagcaggtctgtgtctccaccttgagccaggggagcagacccaaggggccctctggagctgagcaaaccccctgcccaggctctgtcctccttcttcctctgcagattggcctcatggaggtgctggtggagaagatttttgacctggcattcatgcccgcaatgaacggtgagagcgggtgcctgtgcctctctgggagcttgtggcttgggtactgggggatactggcttgttgggcatgctggatgtgcatctatcctacctcaatagtatttctgagcacttcctttgaagcgtgtcgatgaaagcctccaaatccaaacgtggcccccaaagttccagcaccttccttatttgcttctttcttgtttggctgattgttttatttttctgattatctatgaaaattccgattatgtattaacattgtgtgtgtgcaagttttagaaaatataaaacaatttaaaaaaaactcacctcgcagaggcaatgaatctcaacatctgagcatatttccttctaaactctttttctccattgttttcccatatgattgagatctttcctgactcatatttaaacatgtatttatttttaatgatacaggaactacaggaatacattcttattgtgaaaagttccattggcgcagatacagctaaagttgctcttatcgacatccccagcctccttcctagcccagaatctgcccccctagggaaccacatcaagttaggaggttttcttgcccaactttataaacagagtagactgagcttgctttgctctctggggcgtctcaggaatgttactgggaaggctgcttgttgaactatgggggtcattggctactcacatactgggactgggaaactgcccaagccctggggtcactgggccccagactctctcccactcctgcttcctggatgagaagacaaggagggctggcacatcccagccaatgtcatcagctacaccagcgggggttctgttggagccatcttgatgtcaaacaaacccttgttctgggccctgtggtcagaggaagccgagtctcactggtggggaaagtggtggtttctctgtgagaggatggggtcaggggctgggctgggctgacctgggagggaagagacggagcgtcttgcctggcttaatcactaagagtggtgtgaacttgggggcgagtcttttaatcatactgaagtgcaattcaccattttcaaaatgagagcttggacaaggtccatagtccccaaagtgagctccgtaaagcagtcccacaaaataccctgcaaaaagcgttccatggccgagcaagtttgggaagtgctgaagatactcctgcagggtagattcacaatgtccttagctttttgaaaagtcctgctggaatagagaagtctgttaaatttcacttaatttacttcccccatccactctttcctaccccacttctttttctctcttcctgctctctttctagaacagtaattagcaggtttacttaggctctgacaatctgaaaacaaacagcacatcccacggcagagtcaatggctagggctccacgtgcactttccattacttcactcggcaaacatttgccatctcctctatgactgggcgaagggctgggtgatgctggggacacagctcttttctttcttttttttttttttgagatggagtctcactctgtggcccaggctagagtacagtggcacgatctcggctcactgcaacctctgcctcccaggttcaagagactcccctgcctcagcctcccgagtacctgggattacagctgtgcaccaccacacccagctaatttttgtatttttagtagagatgggtttttgccatgttggccaggctggtctcaaactcctgacctcaagtgatccacccaccttggcctcccaaggggacatagttcttgccttcagggaactcacaatgtggtgggcgtgacagatacagaaacagataattaatattttatggtttctctaatagagcagttcggaggtgggatgggggtgctgcaggagccttgagtcgtttggggtccagaaaaccttgcagaggaggtaacatctgaacagtctcagagagggctcagaactcaccagggatgctagggtgagagaatgtgcaccaggcaggaggaactgcaaggacaaaggcctagaggcataaaagaaattgccagggccgggcacagtagctcaagcctgtaatcccaacactttgggaggccaaggcgggtggagcacgaggtcaggagttcaagaccagcctgaccaatatggtgaaaccccatctctactaaaaacacaaaaattagctgggcgtggtggcgcacgcctgtagtcccagttactcaggaggctgaggcaagaaaatcatttgaacccaggaggtggatgttgcagtgagctgagatcgtgcctctgcgctccagctggggcaacagagcaagactcagttaaaaaaaaaaatgaaagaaagaaggaaggaaggaaggaaagaaaagaaaagaaaagaagagaaaagagaaaagggaaaagaaaagaaaaagaaaaagaaattgccaggtgtgggcaccatggctcacacctgtaatctcagtactttgggaggccgaggtgggggcagatcatctgaggtcaggagttcaaaatcagcctggccaacatagtgaaaccctgtctttactaaaacaaacaaaacaaacaaacaaaaaacaaaacaaacaaacaaacaaaaaaagcaaaaattaggcatgttggcatgtgcctataatcccagctacttgggaggctgaggcaggagaatcacttgaacctgggaggtggaggttgcaatgagccgagattgtgccactgcactccagcctgggcaacagagcgagactctgtctcaaaaaaagaaaaaagaaattgccaatcttcttacaaatactggcggcttctggtgagaccaacacctcttggaccactgaccatgtctgactgttttttattttacagctgtgctgggttctggcgtccctctccccaaaatcctcaacatcgactttagcaatgcagacattgacgtgttggaggtaagaggagatcgagctccattctgcttttcctccctgccctttgctcatcacctttgaccactgcattcaggccaggaacttggaagaggaagagaagaggagggaaggggaggaaacagggtcctcttccttccaagcatggggctgagggaacaaggagcagagctgttaaggatccttgaagacactctcccattcagtctcatttagccctcaccacaggtgtcattgttgccatcttacagatgtgagaactgaggctcacagcagtaaggggcttgcccaaaatggaatgtggtatagttcattggagcaacttttattgagcacctactgtgtgccaggcactatgcaggggcctggggatccagcagtgaacaaggacaaccctggcccttgcaaagctctcttagcccaatggggagatggccttttggtaaatattcccgaagtaattggctaattataatcatggcaggtgctttgaagttcacatgcaggggttcttgtttccactataaaaaccacccgtgctcaatatctgaaatttggaaaatatggaaaagattaaaaaaaagtatgcatccatatatatatgtctatatatatatatagacatatatacaatccagcaattccccctgagaacattttgctgcttttcattccagtctttctgaagttttatttttaaacatggctttgctcagggaatcagtagagcattggggttaaagaacgagggcttggagcccagtgaccccagttcaaatcctaactctgccagtttccagctgggtaacctctccaagcctccatttatttcctctataaaaaggggctaatcatactacctacccatagggctgcttttaggagaaaatgggattctgtgtgtaacgtgccttgcacaggcctggcacataataagcacttctggaagtgtccaccattataaataccatcactgtaataaaggatgctgcagtgaacatctcaatgcataaactgtttcttgattctagatttagttccttggaacaaattcccagaaatggaatgaatggggcctttgtgccagattgacaatttccttgccgaaggaaattgccccctcacatttgcccctcacattcatgacaggctcagacccagggaacagcccccttcccacattagggagtcagtcaagggaggtggacaatgaccttggatgggcagtgtgggcaggggtcagatgctggctctgggacagtcccctgccttggcccagtctcttgagatcctgtaggacctcggcactgctttgagcctcagttttctcatctgaaaatggggaacgataatggccacctcatacagtttgtggtgagaaattaaacgagatacagcattttattataaaatgttattattcacttcaacaaaggggttaggaaacacgaacaggattggcacaggtttatcttcatcatcatcatcatcatcatctctactatttactgagatgttcagtgccccatacatagtctttcatggacttggccttaccacatgacctttcatggacttggccatcaacagccctggttgatgtttgccctcacttagtagatgaaggacttgagtatcagagagggtaggccacttgctcgaggtcacccagctggtgagaattagagtttccaccaaaacagtgtgaagcagctcaaaccaatggctctcagtggggctgtactacaccctccctggcccccagggcctttttgaaattggtggagatgaatttttctttcctgaatgtgtgcatattttcatatcaaaatacatattattttattataaatgacttaccttttctttctccttcatattctggtaagggaattatactggtttttgaaatataggtatacacaggttatagaatctgtgaaccttattccagaataataagggagataacacaaatgcctgtaatcaaatgtgtaatgggtattgggtttgaaaggtttaaagaaaacctcagtcccaggcttgaccctgtaggccccctgtaaatggcagctgctattattattattatataggtctagccatttattttaactttttattttgaaataattttaggcacacagaaaagttgcaaacatagtacagacagttccagaatacccttctcccagctccccctaatgttagcatcttacataaacagagtaccatgatcaaaacccagaaattaacattggtacaaaaccgtgaagaatctgcagacgtattcaccagtttcccctctattgcctttggtctggttcagggtccagtcaaggatcccctcttgcattcagttgtcatgtctctttagagtcctccaaggtgggacaattcctcaccttttccttgtgtttcataaccttgacatttctgatgagtctggcctattttgtgcgatatgccctggatttgatggacacttttttcacaattggattgaagttttgtggttttggcaagaacaccacagaagtgacgcagtccccagtgcatcctttcaggggataccgatgtccatgtgacttattcctggaggtgttcactttgagtgcttgcttaagtgcttcttcactgtaaaattactatttttcccttagtagctaatcaatctcttgtgaggaggtaccaggagaccatgcaaatatcctgtttctcgttagactttctcccactaatttttgccattcagtgttcacggttttgtctgcaactgttatgactgtggtgtgtgcctaatggtgatattctgcttctccaattcctttgacatgtgtcagctggaattctaccgaggaagagctgtcccttctcttccatttatttatttatccatttaattatttatttctgtcgatagagactcacgaatttttttttttttttggtctatgggttatcatctcttacttttattatttattttgttgaagtttttttttttttttttttgagagggagttttgctcttgtcacccaagctggagtgcaatggcgcgatctcggctcactgtaacctccacctcccgggtttaagtgattcttgtgcctcagcctcccaagtagctggaattacaggcacgtgccaccatgcccagataatttttgtatttttagtagagatatggtttcaccatgttgcccaggctggtctcgaactcctgacctcaggtgatccacctgcctcagcctcccaaagtgttgggattacaggcgtaagccaccacgcctggccaaaaaattttttttaattatgaaaactggattttggaagactgtgaagagggactcaggcctacttctcttattttggggaataaggggatgggaagtgtcttgcccaaggtcctctgcacagggccagataatgacctggccaggtgctcctcgggcctgcatgacccctttatctccgctgttcagagttactgcttcctagaaacatgaccggccagatccgtaggcaggtgagtagcaaggctctagccagagccaccccacccatcaccggctactctgttctgccatccaaggaccttttggtgctgagcgcatgagtgacagaggcagagatgctgctgcaactggaagaagctggaaccagtcccagagaggctcggcctggaaacagtcccctgcccagagtcccctcagcctccatgacaggtccctccctggccccccaaccctcttcctcccttgccccaaccctgagaaagggtccagccactaccctgttggcaaacattcccttccatggtcagcctgccaggaggaggggagtcaccttggggctggaggcctctcagaccccatcctgacagcaggttgagtattcccactttcaataaaagactccactttcccggcacttgtgacgagtttccatgaaggaccctccctcagggtctggatggtttgggtttttttccctctttggctgcgcccgggcacttggcagttgtagctacaactgcgggaatgatggtccctctggggacagcgggggaagcaacctgtctcttcatattaaaacaaccacacagcattctatggagagggtcccctgccaccaggacattttcgtacttcactactctcaactctggcatcaggaggtcattaaagtgcaggagttttggagtagggaggatgaggttcaaatcccaactctgtcacttggttgtgtgacttgatgaggtccttagcctttctgaatctcaattttcccatctgtaaaatggataatagtaataattattatactccaaaatgagtgtgaggatattaaataagatcaggtatttctgaggcacttaacactgaggctgacatgcagtaggtgctcaatatgtgctcactgtggttagtaacaaagtccactaattcctaaagtgtgagcttgtggaaccccttgcctctagtcagaggtaaactgaggacaaggaggggtccttggcatgtctcttggccgagacagtgcccaggggacccctcctagggacagtgccacatctccctgtagagccatagggcacattcagagcagtttaggagagttatttgatcccagccttgaaggcgtgcagaaatactgaagtcccttttacataattaaggatttttttttcctcctagtgatttttaaaaagacttttttttatgtctctgttgttttcttttacttaaatatcaggaatctaagctactgggttgtcgggttcaatagtagatttctggcttcaccatccatccattcttgcattcactgactgtctagcaatgatttagggactgggatttctacacttgacaagggatacagggcttcctcatgaaggttaggttctagtccatgagacagactttaagtaattacggcctaagtaaacaataacgagtaaatcaataaacagaggtcatttgagattgtcatgggggctataaagggaataaacagggactcctcttggggagggaaggggaaaggaggtggcaccattgggtggtcagggaaggcgtctctgaggaggaaacacatcatcagagacccctctgggggccttcacagcccaccacccttccctccgcagcttcctgggtctaggtgcctcctggtctccttggtaacggccaaaccctaaccccttggaggaggaaggggctcagaaagaagcagggtgggacttcctgtccagcctgcccagggaagggctaaaggggaggaagtccttacttagagggtggtgcttggggaggaggctgctcctttcctgtcatggctgccctctctttccttccactgtgttagaaccacctgctataaatcctcatgaattcatccatttgtttccatccctgcaccaccctggttccactcccatcatctctcccctgggccactgctccagcctccccagtgctcccccaccttccactcctgctctgactgatggagggcaggtgagccccagaattggggcttatcccaggcgggttcttggcttctcccaggaaagaattcaagggcgagctggtggtgtcagacagcaacttttactgaagcagcaatgcatggcagcagagggactgctccttgcagagcaaggctaccccacaggcagtgtgtgcagaggagcagcggataggcttttggcagctgtatgtcaacccacttttaattacatgctagttaagaggtgagttatttggaactttctgggaaaagagctggaagtttctggaaccatttaagtaacttctgagttgttgccatggcccattgccatggcatttgtaaactgtcgtggcccagtgggagtgtccttatgcagtgagggcaactagagtcgccttcgtggccatctgctggttttccctggcttcctcactgcaccctcttttgaacaaatcctgctctgattaggagggtaatgatcaaagttatgaccagtgctcggaaaacaagtcctggtgatctcctacctctgtaccatctattctccagtcagctgtaacaggtctggatttttaaaactgcagatccaatcacttccctccccaggttttccttccgtgagcttttcatgggtgcagagcaaaatccagaccctcaccactgcccacaaggtcctgcagggtcttctcccatccccattccccagcccacctctccctagtcctctgctgaagaagggaaagtgaagccctccacggggccctcccaccctttcctcaggaggcttcacaccaacttatgtcggacatcttaaaacatacccacatcctttaacaagtttgatttattctgctattcagtttttgagaggatttttgaaacttaaaaaaaagttttggcattataaataactcatttcagccaggcatggtggctcatgcctgtaatcccagcactttgggagaccaagccaggcggatcacctgaggtcaggagttcaagaccagcctgcccaacatggtgaaaccccgtctctattaaaaatacaaaaattagggcaacccacttgggaccccttccacaccatggaagctttgttcttttgctctttgcaataaatcttgctactgctcgctctttgggtccacactgcctttatgagctgtaacactcaccgccaaggtctgcagcttcacttttgaagccagtgagaccacgaacccactgggaggaacgaagaactccagatgcgccgccttaagagctgtaacactcaccgtgaaggtctgcagcttcactcctgcagccagcgagacgagaccatgaacccaccagaaggaagaaactccgaacacatccgaccatcagaaagaacaaactctggacacgccgcctttaagaagtgtaacactcactgtgagggtccgcggcttcattcttgaagtcagtgagaccaagaacccaccaattccagacacaagatcacgacattgcactctagcctgggtgacagagtgagactccatctcaaaaaaaaaagaacaaggctaatctttcctgaacattaaaactttgcacccggtgctctccctctccctctccctccccctccccctccccctctccccacggtctccctctccctctctttccagggtctccctctgatgccgagccgaagctggactgtactgctgccatctcggctcactgcagcctccctgcctgattctcctgcctcagcccgcccagtgcctgctgttgcaggcgcgcgccgccacgcctgactggttttcgtacttttttggtgcagacggggtttcgctgtgttggccgggctggtctccagctcctaaccgcgagtgatccgccagcctcggcctcccgaggtgccgggattgcagacggagtctggttcactcagtgctcaatggtgcccaggctggagtgcagtggcgtgatctcggcttgctacaacctccacctcccagccgcctgccttggcctcccaaagtgccgagattgcagcctctgcccagccgccaccccatctgggaagtgaggagcgtctctgcctggccgcccatcgtctgggacgtgaggagcccctctgcctggctgcccagtctggaaagtgaggagcgtctctgcccggccgccatcccatctgggaagtgaagagcacctcttcccggccgccatcacatctaggaagtgaggagcgtctctgcccggcgcccatcgtctgagatgtggggagcgcctctgccccgccgccccgtctgggatgtgaggagcgcctctgcccggccgagaccccgtctgggaggtgaggagcgtctctgcccggccgccccgtctgagaagtgaggagaccctccgcgcggcagccaccccgtctgggaagtgaggagcgtctccgcccggcagccaccctgtccgggagggagatgggggtcagcccccgccaggccagctgccccgtccgggagggaggtgggggggtcagccccctgcccggccagccgccccgtccgggaggtgaggggcgcctctgcccagccgcccctactgggaggtgaggagcccctctgcccggccaccaccccgtctgggaggtgtacccaacagctcattgagaacgggccaggatgacaatggcggttttgtggaatagagagggggggaaaggtgggaaaaagattgagaaatcggatggttgccgtgtctgtgtagaaagaagtagacatgggagacttttcatttagttctgtactaggaaaaattcttctgccttgggaaactgttgatctgtgaccttacccccaaccctgtgctctctgaaacatgtgctgtgtccactcagggttaaatggattaagggcggtgcaagatgtgctttgttaaacagatgcttgaaggcagcatgctcgttaagagtcatcaccactccctaatctcaagtacccagggacacaaacactgcggaaggccgcagggtcctctgcctaggaaaaccagagacctttgttcacttgtttatctgctgaccttccctccactattgtcctgtgaccctgccaaatccccctctgcgagaaacacccaagaatgatcaataaaaaaacaaaacaaaacaaaaaaaaactttgcacccatatcagtttctcttcatgacctaaaggaaaagatctgaaatcaattcaaattattaagtgaattgaatttctttggaaacaaacaccacttagaaaatcttattctcatctacttttccaaataacaagatatataatgtactatttctgcttagaacttataaaagtcttttatgtaatttttttcaccaggaaccctaaagctctcatagctctcgggagcatcagaagtagcaaaaccaatcaaatttcaaatacctggtatcctctatcaatttttagaggcttgataatggtagcttaggaatttttggataaatagagcagatagtgaattcttggaaatccataggaaacaaaatgactatttatagaaccaaataaaagccttccgttagaaactaaaaaaaatcaatggtgttttatgtgtttatataagcaaaatgcaaaggagaaaaaacagcaaataaatgaaaattagaagaaaaaaaaacaaacaggaaaccactccccaatttttctcttacttggtttacccaggaggctatagtattgcccagagcctacaaaaacaaatgatgaatattttgttcctggtacacaatttaatgtctttaagtccaccaataccattatgtattttttgcaattgagaaattcactttaggtacatgaccagtaagtactttagtgctgaaactgtctatgcagaatagcaaaaatagtgtgaagcaatgcaagcatatatgtgaaatttggctccatgctaactaaatctggcttcatgcttaactttattaaaaaagaatggccaaactgccaatgtatttctttacaatattttttattttactttcttcaagattaagaactttatgaacagtgttaattcgctgaatttctccaattttctatcagcttttaaagaatattttactatctaagctttttcaacttttttttttttttttaaataaccagtcattttactttaggacaaaaatttaccttacaatttaccatcctttctcatatgaaagtattctcttttctttatacccttccttaccaaaaacacatcttcatatctgtaactttcttttttttctttttttttttgagagggagtctcactctgtagcccaggctggagtgcagtggcgccatctcggctcactgcaagctccgcctcccgggttcacgctgttctcctgcctcagcctcccgagtagctgagactccaggcacccgccaccatgcctggctaattttttgtatgtttagtacagacggggtttcaccgtgttaaccaggatggtcttgatctcctgaccttgtgatccgcccccctcggcctcccaaagtgctgggattacaggcgtgagccaccacgcccagcccatatctgtaactttcttcacatcactctcccctacttactgattccttactactttgtttcatgaataaccttttcaagtccatattttgaattaaactttagataacttctgaattaaataaaaattattatttttctcactaaaaaaaaaaaaatacaaaaattagccaggtatggtggcatgcccctgtaatcccagctacttgggaggctgaggcaggagaattgcttaaacccaggaggcaaaggttgcagtgagccaagatcatgccactctactccagcctgggtgacagtatgagacaccatctcaaaataaataaataaaaaataaaataacccatttcattttccactgggtctgatttctcaaaagtcaaatgacatgctcatgtgttcttgtaaagtgaaaaaatggaaggatttgggagaccagggaaggaggaagagactggattgggccagatgagaatttgggcagagcagcatggggctgagtgcccagatgacggtggatggtcaggaaggcttggaattctggagaagaggagtgaagcaggatgtgattagtgctgctgactcaggagaggggcctcaacacccagcctgatggtccagggctcagaccacactgatccattcttgctcatgacagtggatcaagccatcactgcaccctgcattgacaatgacaaaaccaagtgaacggttgttttaaatttaaacacaaggaaagcctcactgagcatctccaccagtttgggatgatacagaggtttcactgatgatcatagatgctccttaaaatgtcaggattccagctgtctgtgtgtaagtgctgtgggctcctggaagccctgtgtggcagcagatttcatggcagaatatgccatgtatctccgctaatgtcttaattcagttgtagatgacaaataacaaactcgagcagcctcctaaagacttcacttagtagatgtttctgctattaatcctgagtaacaaaccatctcaaaacttaatagcacaaaacacaattttagcttcctcacagattctgtgggtcagaacagcttatctctgctccaagatgtccggggtcctcagctgggaagactcaaacaactcggggtgatttgagagcagggggttggaatcatttggagtcttcttcactcacctgccggctggttgatgttggctgtcagctgtgacacctacacatggcccctctgggtactgggtactggtatcccaagggagcaaaatggaagctgcatggtacttttgtgatctggttttggaagtcacgtagtgtcacttctgcttatacacagttagtcaaggtggtcacgagagcctttctaggttcaacaaagtggccacttcatcagtcttatcacaatggcatacaaccctgatgttaccggtgggctgggggaggtccccaaatgccaatgggaccttgactccagccagcatccaggctcttgacaccattgcaagaaggaattcaaggatgagtcagaaaatagtgaaagtatggagatttattgcaaagtgaaaagtactcactcaaaaaaaggggagtgcaggtgcacttaagagagtcatgcgaggggctttgaggctgctacctttgtggatttctttaatcaaggggtggaatgttcataaagattcctgaaaaaaagtggacatttcagaactgtggtgccattcatttttacaccaaatatggatgttcctggaactgtcatggtgctggtgggtgtgtaatttagtatgttaatgatcatataatgagggcctaggtgaaacctaggtcaaatccagtgccatgtttggtccagttggtcttagccagtttggtgcacaccatttttcaccatcttatcagctatttcaacagtttcattttactagtcatgtgaaactgctgcctgggattttctgttctcttgcaaccaccctgtattattcatatctcattttcagtgaccctagcatctctgaagtggttcactttgtttcttcttagcttcaccaccctgaccttcaatcccacactgataatcttatttgcaggttgactactaaaaagagtactatgctactccagtcctcctatttttcagatgaggcaagtgaggttcagaaagacaaagagcatcccccagaagcagcaggctggtgattcccaggaaatacttggtttcttatttcaactgcatcagaagccacctcgatattcagtagcttaataaacccaacactttattatttttcatgcttctgtggattaactaggtagttctaagtgtggcgttggctggggcactgggatagctgaacagtccaaatgacctcactcacacagctggtagttttgtcagccactgtttaggagctcagctgggactcttggctagggagcctctgttctcctccacataactgcttgagtttcctcctattatggtggctgggttcaaaacaaagacattccagaatggcgaaggtgaaagctacagatttcttaaggcctagccttggaagttatacagtgtcaattctactattatttttgtcaaaatagcccatgagtcagcccagattcaaggagacaggaagtggactccacccagcaatggaatgagtggcaaagaatatgtgatcatctttaattcaccacaggttctccagttggtagtgaagcaggtgagcaaagttgaaggcccaggtgtcaatcccagagtggtttgtaaacatgaggaacaactaatgaccaacaggaggaggatagttaaaataattatgttcaatatatgcggtggagtactctatcactgttaacaaaagacacagaaacgtatttgtaatacattgctacatgaaaaaagagcttataaaaacactgtgcagggcataatcccatttttatttagggaaaattttacccaactttacctgtatgtgcacagaaaagcttctgaaagaagatacaccatcattcttgtggtggttatctcagagggtgacattgatttctttttttcttctagcgaatttgtaccttctttaaaaaattaccacagaaattgatttttttaaataaaaaagaaattcccaaagggcaccaaaacaacccagttattctctctgggaattgcagccaggcactgcgcctgaggccttcccttcagtgtagccctcactagtgtcagtgcggccccagctcaagagagcctctttgagtaaagacttcccaaggcctcttctcctgccctgtgctcccagccaggatcctctcccagtgacttgggagtcttggacaaggcagcacccacagctcaacctaggggctctttgggtgagaaaatccttgtgccttttggtgttagtgggttagtttttggattaggtgaagtgacctcttgagtgtaaattcacggacacaggtcaggtgtgacagagaggagggtaaatgggaaggagctagtgtttattaaatgcctagcaagtgcaagagcagtgccaggcattgcccattgatacggtttcgctgtgtccccaccacaatttcaacttgaattgtatctcccagaattctcacatgttgtggaaggaacccaaagggaggtaattgaatcatgggggctggtctttcctgtgctattctcgtaatagtgaataagtcccacgagatctgatgggtgtatcaggggtttccacttttgcttcttcctcattctctcttgccaccgccatgtaagcagtacctttcaccttctgccatgattctgaggcctccctaaccatgtggacctgtaagttcaattaaacttctttttcttcccagtctcaagtatgtctgtatcagcagtgtgaaaacagactaatacagtaaattggtacctgtagagtggtgtgttgctgaaaaggtatccgaaaatgtggaagcgactttgcaactgggtcataggcagagcctgcaacagtttggagggctcagaagaagacaggaaaatgtgggaaagtggaaattcctagagacttgttgaatggctttgcccaaaatgctgatagtaatgtggacaataaggtccaggctaaggtggtctcagatggagctgaggaacttgttgggaattgaagtaaaggtaactgttgttatgttttagcagagactggcagtattttgcccctgccctcagagatttgtggaactttgaacttgagaaagatggtttagggttatctggaggaagaaatttctaagaagcaaagcattcaagaggtgacttgggtactgttaaaggcattcagatttataagggaagcagagcataaaagtttggaaaatttgcagcctgattatgtgatagaaaagaaaaatccattttctggggagaaattcaagctggttgcagaaatttgtataagtagcaaggagcctaatgttaatccccaaggccatggggaaaatgtctccaggccatgtcagagaccttcatggcagcccctcccatcacaggcccagggtctcaggaggaaaaaatggttttgtgggctgggcccagggtccctgtgctgtgtgcagcctggggacttggggccttgcatcccagccactccagctgtggctgaaaggggccaacatacagcttgggctgtggcttcagagggtggaagcccaagccttggcagcttccacatggtgttgagcctgcaggtgcacagaagtcaagaattaaggtttgggaacctccacctagatttcagaagatgtatggaaacgcctggatgctcagacaaaagtttgctgtaggggtggtgccctcatagagaacctcactagggcagtgcagaagggaaatgtggggtcagagcccccacacagagtccctactgtggcactgcctagtgatgctgtgagaagagggccaccgtccttcagaccccagaatggtagttccactgacagcttgcatcatgcacctggaaaagccacagacactcaatgccagctcatgaaagcagcttggagggaggctgtaccctgcaaagccacagaggtggagctgcccaagaccgtgggaacccacttcttccatcagtgtgacctggatgtgagacatggagtcaaaggagatcattttggagctttgaaatttgacttccccactagatttcagacctgcatggaccatgtaacccctttgttttggccaacttctcccatttggaatggctgtattcacccaatgcctgtacccctattgtatctaggaagtaactagcttgcttttgattttacaggctcataggcagaagggacttgccttgtctcagatgaaactttggactgtgaacttttgggttaatgctgaaaagagttaagattttgggagattgttgggatggcatggttggttttgaaatgtgaggacatgagatttggagaggccaggggctgaatgatatggtttggctgtgtccccaccataatctcaacgtgaattgtatcttccagaattcctacatgttgtgggagggacccagggagaggtaattgaatcatggaggctggtctttcccgtgttgttctcatgatagtgaataagtctcatgaggtctgataggtttatcaagggtttccgcttttgcttcttccgcattctttcttgccaccaccatgtaagaagtgcctttccccttctaccatgattctgaggtctctccaagcatgtggaactgtaagtccaattaaacctctttttcttgccagtctcgggtatgtctttatcagcagcatgaaaataaactaatacacccattgattattttgtgaaactctcacagccatcctgggtaataaggggtcttatcctcatttcagatgaggatgtgaggctcagaaagcttaagcgaccagctcaggtccatccagcaagcaagtggagcagctgggacatggccccaagtatgaccctagaacctgctctttttcactgctccatagcgagtagaggcacagaaaaacaagaaggaaaaacaagagggtttggagaaaagaaaaaggactagtctcatgagaacatgtgagcagcaggagatgggtatagtaaattggtaccagatcatgaatgcattgatgcctggaaggctggctgaagagtttgggttttctcttgcaggcagtggggagctacggaagtttcttggggaggagaggtacctgacattggtattggatatgctgagatggacaaagtagactggagtgagaaaggctggagtcagggccttggaggaagacaggagacccctgggggcaggggaggggatctgatcaagtggacattggcatttcatttcatgagacctccttgagtgaagtgagtgctaccgcctggatccctgaggtgtccccacttccaagccccaaggtctgagctcaggcatgaagccccatcccatgccccagctaccaccttctttctgccatgcctgaggttctccaactggatgcaggcaccctgccaatgtcaccaatgcttgctctcaaatgattaaactttctgttttgcacatgattctggagcagagtgagtgtctgtggttcactgacaccatcagcctaaaagtccccagcatggagctcaagaaatgcaagtcctctcctgcttccccccataagacctttaatttttcgtggaaactgaggcccaggacatcaaagggccacttaccaggagtagtacggcagggtcaggacccagcctctgagccctcatcaaagtttctctcacttcatcatagaagccccagggcagcaggtaaaaaaattgcagatccccaggcccacactccccagagcttctgtctcagtagttccaggatggagaactggaatccaaatttaataagctgcatgggtgggtctgatgcagctggattgggggacacttggagaaacattgctttagtcgactcttgcctttaggcagtcagggaaactaaggcttggagagggcaaggggcacacagcaagcaggtgatggagttgattgtagaaccaggtatttgatgcccacctctaagtccaggtgaccgtgacttacatgtgatggtgttccacgggatccctcaagccccaagagtgtctccctcccctgctcaaggtatgagccaagtgtgacagctcagctgtcaactcccagcccagccactttccaggcaaaaggtgactcggaaaaggacgaatacagaagctggcatggcccaggtttgataaaaacaagccgggcatttgcccaaagggagccacaggggctcagctctaaggaacacttgttctgagccctgagctgactccagacctgcctccctccccgccccacctgaatgctgacatctcacctgttggcctcaccagatgccatatatctgccccctgggggattccacacctccctcccagtctctcaggccacactgccatggccctatcagtcctcctccacctgctcttgtcctcacccagtcttgccacagccctctccacttcaagttgctgggacccttttgtcgtcactgttctggttctggaccttctttcctagtttctggacccgaaaagactcccaggtcctgtctttgcccagatctgccctgtcatgagtcacagatctgagcatctgatccttcatccagtgagcattaattgagcaactactatatgccaggttatgtggttatgtggacagcctcccttccctattgtcatccaaatttaggcagctctactattttgtgggccaagtgtggacctggaaatctttgccaagtctgtgattcccccgccaacctccatccactaacccctgggggtctattatttctccagtgtactgccaggggtccaggagcaggttcccatgctcctccgcacacttgggcagtgccctaccccacaggagggttataaagcatgttgtggttgcaatctcacttgaccctcatctgggaactgagagagaaagcagagattcgaattcccatttcacaagtgggggaactgaagcatgggaaggtgatctggtgaggaaaggcagtgttgggatggtgattcaggcctcctgatctcgcctgcagggctctttcctctgatcattacagcaacaatggatcgagtctactcggtgcccagcttagtgataagctcctggcatgcactcattcagccatcacaacggctcctcaaagcaggaacaaccattatctctactttacatgtgagggaattgaggcccagagaggggaattgaggccagagagggcacttgaggtcacctggtgcatgatgagcaaagttcggtttcaaatgcaggttgtcctgacatcagagcgccagatcctaacctaagccacagagattatggggggaaatttaaatccagccataggtgtggtcctggaaagtggccagaggaggtgggggtgaggttaggagtcagtccacattgcactatcagcattgaaactgacacttgaataatcctatactcaaacctatggagagttttcttgtatccctgctgcaatttacctgatataagacacagcatggccgtggcttcagatgggggtttctgggctccctgatagaaaaacaggtggagctgctgtggggcttggaagccctgccctgcagaccctttcacctccaagactgcccctacttaatgaggataacacggcaaccatggtgatagctctctactaaaggaagatggacaggatggtcacagtcacagctcggatggtcacagtcgcagctcagatgttccgagcacttgccatgtgccaggtgccacgtggccaagccctatatttccctatttctttactttttcttgtcctcattttacagatgagaaattgaggtttagtcaagttagctgaccacttcaagagcatactgctcataaatggaagactcaggatttaaacccagtgcccacagatgcctcgaccatctttaatccagtggattggagcagggatacaagaaaactgtccacagatttgaatgtaggattatttaaatgaatccatttctgcagtgtcatcattcctgtgttctcttttccaagaatcttccttttaagggtggcttctcctttcccatctttttttccacattctttctcctgtttttttcttttaagtacagggataatcgaacattttgggaggccaaggtgggcagatcacttgagctcaggagttcgagaccagcctgggcaacatggcgaaaccccatctctaccaaaaatacaaaaattagctgggcattggtggtgcgcacctgtggtaccagctactcaagaggctgaggtgggaggatcgctggagaccgggaagtcaaggccacagtgagctgagatcacgccactggacaccagcctgggtgacagagtgagaccttgtctcaaaaataaataaataaattaattaatttaaatacaggaactcgctctgacacttgggctggagtgcagtggtgtgatcataattcactgcagacttgaactcctgggctccagcaatcctcccacctcagcctcctgaatagctgtgattacaggcatgagccactacatccagctaacatattttttgtagagatggggtctcactgtgttgtccaggcagcctgcccacccctggccttaagcgatcctcccacctagtgctgggattacagataggagctgccactgaatctttctgcttcttagcatttctctctttgtccccaacccctactcaagtgcattgcctggggggctcaacctccagggctctgaacaaagggacagagtgatgctccagtggccaggaagcaagccaggtggttttcaattagctttcaacaaaagaggagtgttgctgctggtggtggtattaatctgctggaattgttgcaaaaccatttttgataaaacatcatcacatgatttttggcatttacattgaaagcagttcaaagaattgagcaacactgttttaccaaaactctgttcattcttatctgctgacctgtatttgctaaacaaataagcggatgttttttaagagcgcttaggtctctaaaaatgaaaattaggtctctgatgagtgctaaacactgcctccttctagcaataagcaaattataaatctgttaaaagaactaattggaaaaaagcccaatccatgtcattaacacatccatttccaaatcaatattactttgtgtttaattattatcaaaatttgttttgataaattgtatatcactattaatagtaacaatctaaaagattattttaaatacatagtgtccactggtcaaaggagatttgaaaaaaatttaatcaagatacatatttttttaatgtttactttttaacaaatttttatatttccataggttttgggggaatggtatttagttacaagagtaagttctttagtggtgatttgtgagattttggtgcacccatcacccaagcagtatacattggatccgatttgtagtcttttatccctcacccccttcccaccctttccccctgaattgccaaagtcattcttttttttttgctctgttgcccagggtggagtgcagtggcacaatcttggctcactgcagcctccgcctcccaggttcaagcaattctcctgctacagcctcccgagtagctgggactacaggcaagcgcctctaacacctggctaatttttgtatttttagtagagatggggtttcacgatgttggccaggatggtctcgatctcctgacctcatgatccacccgcctcggcctcccaaagtgctgggattacaggcatgagccactgcacctggccgccaaagtcattcttatgcctttgcatcctcatagtttagctcccacttataagtgagaacatacaatgtttggtttttccattcctgagtaactttacttagaataataatctccaatcccatctaggttgcttcgaatgctattaattcattcctttctgaaggaatgaatatgcccggccagttcacatgtttttaaatggatgaaggtgctgagtagtattccatcgtatatatatacacaccacagtttctttattcactcattgattgatgggcatttgggttggttccacattttttgcaattgtgaattgtgctgctataaacgtgcatgtgcaagtatctttacacataatgacttctcttcctctgggtagaaacccagtagtgggattgctggatcaaatggtagttcaactgttagttctttaaggaatctctatgctgttttccatagtggttgtactagtttacattcccaccagcagtgtagaagtgtttcctgttcaccgcatccacaccaacaaagatagatatttctgatgcagaagagtctacctctctccttccctgtccaacttcattctctgttttttccatttgcgagcttcacaccagctttgctggcctcctaactattcctgtaatgcaccagcaccttccccaccccagggcctctgcatgtactgtccctctgcctggactggtcaaccttcaatagtattatggctgcctctctcaccctctgcagtcttcactctaagtcaccttctcagggaaggtttctctgacctctgtatctaaaatttctcctccttcccctcaactcttttctccttctgccctgcctgcctccccctcactccaccaatcactgttatacttatttgctttgtttatatatcaactaaaatgtcagttatatgagaacaggagcttttgtctgttttgctcacctggtgaccccagtacagagcctggcttgtagcagacgttcaatacactgtatttagatgaatggaggaatgagcaaatgaaggaatggatgaatgagtttaatcaacatcggactttcaagcataaatatctattacattagactaaaactctgtggggacagtgctttttgtgcaatgcaaatacaaattcaaggagaaaaaagaatgccacaaaatttctgactgttaaagaatttgttcacgtttttgttgttgttttttcttttttgtggtttttttcttttttgagatggagtctcaatctgtcacccagactggagtgcagtggcatgatcttggctcactgcaacctctgcctcccaggttcaagtgattctgctgcctcagcctcacaagtagctgggactacaggcatgcaccaccacacccggctaatttttttgtatttttagtagagatggggtttcaccatgttggccaggctggtctagaactcctgaccttgggtgatctgcccacctcagcctcccaaagtgctgggattacaggcatgagctgccgcgcccggccagttcacatgtttgtaaatggacgaaggtggaaatcaaaccactgtggaatttgtagtccattggatacatgtataaatgcacataaagaaatataaatgtattccttttaaatgtcagtatttgcaatcccctgaaaataaaattgacaactacttcaactcatgctgaaaatttgagacgtcaacttgcaaacgggtgagggtcatgtgataccaccagaatggctaaagtgtaaaatgggaaatgccaagtgctggcgatcagaacttgccttcattgctggtgagagtatcagatggtgtatgtggaaatctgcttggcagtgtctactggaactgaatactcacaaaccgcaggatccagccattccactcctgggtacacacccaacagcaataagcacacatgttcaccaaaaggcaccagaagctttgcagcagcattgtacgtaagccccaaactggaaactgcccaaacacccatcaacagtagacggaaaaacgacattgcggtaacttacacaatggagcacactcaggcatttaaaatgaacaaacaaggcctgcacacaaccacatggattaatcacacaactgtgatgttgagtgaaagaaccaggcacaaaaaggcacgttctgcacgattccatttacgtaacattcaaaacccagccaaatgaatctgcagtgtgagacatgagaatggtactggagttccctttgggggcaagttagagactgggaggggcctaagtggggctctggggatgtggacgatgccatatgttttgcttggatgctggttgggtggcatgttagcctgctcaggctgcgataacaaagtaccccagactgggtggcttaaacaacaggtgtttatttttctcatcgtctggaaggctcaaaatccaggctcaaggtattggcagggtccgtttcattccaaggcctctctcactggcttgcagatggccgtctccttgctccatcttcccatggccttgcctctgtgtgtgtctgtgtcctcatctcttcttataaagacaccagtcatactggactaggccccacctcatgagctcattttaaatggattaattacctcgttaaagacactatctctgaatacagtcacattctgagatacggggggttaggacttcaacatataaatttggggtgctggttggggacacagattagtccctaacccctgggaagtttcactttgtacaaatccctacagccctctgcctatggtatgggccctttatgtatgtctgtcctgcttcaataaagatggtgtgaggggcacatggttttaaggaattctgaacaaaacatagaggttgctctgaccatcaagtatggtgtttcctccaaaggctgtagaaatatgcctggcataaatcacagaaggctatgaacagccagagaaatggagcatccaccaggactctgcatcaaactccagggaagagctccctggaggtggaggcgctggccaggctggtctgccccatccccagcagaccaccctctggccaggcctcccacagggagctctccagcccccagatgcctgcttttctgatggtgcaaaccaagcttcaagcatgggaggccctggctccttggccgtgagcactctctccccgactcagcctggccctgctgtcctgtccctcaagcctgccatcaccccaccctggtggggccgtttttctttctcctgctgagtaaagtgtgaaacaggtgaaaaggctgcagacagacaggaggccagccagccagccccaggcagtgccccagccaccttgtggctgactcccattcccataccagtgacactcagagggcactgggtagagccagggtacctgagagggatggcaggagggatcaggagaggcccactggggtcagtgctgtgtgacatggctcggcctctctgggctgcagcctcctcctgctctgacgttcctcaaacccccaagagggtttcaggaagagtcacactgaggttgtgaatggtgacagaaagaccaacagccccttcaatgggtaccacccttcacaggttgcaagttgctctccttgtccctcagggagcaggtgctaaggccagcaccaagggggaacctgagacagagaagagtcagtcccacgactggccaatggcagagctgagacctgccctgaagccccggtgcagattccagatctggcctgggatgttccgagggccctgggtgcccctggtggggagggagaattccagtgcaatgactggcatttccagagaaatggtgacacttctgtcagccagcaccaggattccctcaggaaaaccgggatcccttgggaacattgccaattccctagaattcctgcaggatttgtacagtatcttcagagacattgacattcttatggacaatgatagctctgaggaaacactgaagcgtcattagaattccttcagaaacaagtaaaaggtcttttggaaatagggacatttcataaagaaaggctggcattcctcaggaatttgggctgtcctctcaggaatgtgtgcattctcatgggaattttgagatttctctgaggaacgatgagaccctcacaggagggcagcgggctcccccagacagtgattctctccaagaacacggagagactccccagggagctgccttggagtccggagctggcttccccgggcttaggacagcttgagcaatcagcggaaaggggtgggctcttccccatgcattgtggatattcactcagaacagagacccgccccccaagagacatacagacaagtgcacacacgtacacacacacaaagccacatacagttacatgcacagatgcagtccacacagacacacacaggcacctgcacaaaagcacacacagacacagacacacaccagaacatacatggactcgcagtggcttcaggaagtcacactcctcccaaagttgccagcccagatgacttatggcctcattcccctcagggttccagggcagggccctggatgccctccccacctccgtcctggtgtcagccagagtgactggtgctccaggagccctgctcaggcctctcaagcctctgcccacccctggccccggcccccacttggcctgcctacctgcaacttaagcttccctctgctcctggatcttactccggaggcagatgcaggagtcccaccggtcttgggtggccggaaccacatcctaggtaaggaccctgccctccctgctctcagagccctggggaatgcgcaggtgatgaggaggaaagagttggagccctgggtcccagtcctggctttgtcactgacctgccagggaacccaagggcctcaatttccagatctgcaaaatgggcaccctcggtcttttgtatattatgtctgtcaaacagccgatgcccgacctgagggagaaccaaagcccactcagccagggacccaaaccatgtcagctcatggatgttttgtgtttattttgctcgtctgtggtcctttttaagacaatgccgttaattttggggacaaaatttcttgctctgataatcaaaaataattattccagctaggcacagtgactcacgcctgtaatcccagcgctctgggaggctgaggcagacagatcacctgaggtcaggagttcgagaccggcctggacaacatggtgaaactctgtgtctactaaaaacatagattggacgggtgtggtggtgggcgactgtagtcctagatactccggaggctgaggcaggagaattgcttgaatctgggaggtggagattgcagtgaactgagattgttccactgcactccagcccagaaaacagtgtgagactccatctccaaaataataataataataatttcatcagcggcagaaaattgtaatctgtctaacatgactaagaaaagctcctacctgggggcagggacataaggactcaaagagatggtgcaggagtgctgtgtacagggcctggcgcttagaaaatgttgtcgtcatcactctatgggctcccccattagccccgaagagaacagggtccctgctttgcacaactgctttgtgtgcacaggtcccaggtgagaagggagcaccctcacttccagaaacgagttcatgcccatactctgcaggggggaagccgcgtgaggagccattcacgggggtgatgggtaagttgagtgtttgcaaacaatagttgttgtcgttccatttctctgtccaatttctgagaagagagaatttccgcctactttgtctgtagggttctagagcagacatggaaagaatgccattggctgtaaaacacgccactcttttctatgtactagcaagaaaaaaaacacactgttacctaaacacgttgatggtaagatgcattctgatttccaagagagtaaaatgagaaaaagatatgtcttcaagccaatgaaacatggtgtaaaaaccatgacggggtcatcaaggtaattgatacgacctcccagcccttaaggggcaaggagtgtcctccttcccactgtagtctttctttttttctttattccatgtttttgtttgtttgtttgtttgtttgtttgagagacagagtcttgctctgtcacccaggctggagtgcagtgttgccatctcggctcacggcaacctccgcctcctgggttcaagccattctcctgcctcagcttcccaagtagctgggactacagatgtgtgccaccacacccagctaatttttgcatttttagtagaaacgaggtttcaccatatgttggccagcctggtctcgaactcctaacctcaggtgatctgcccacctcggcctcccaaagtgctgggattagaggcgtgagccaccctgcccagcctattccacgtgttttaaatggaggtttcagttgtatacagtaaaagatgcagtaagaaagacaggtttttgcttatgtgtgcacccttgcaaccaccacccagatcaagggacaggactttcccaatacccagaaagagcccctttttgccccactgcagtcagtacctgcccccagaggtgacccctcttctgacctctatctctgtgggcaagtactgtctgctcctgaaattcacagaaagagccatacagtgtgagcgattctgtagctggcttcttttgttcaatgtcatgtctgtgagatccccctatgttgttgcctgtgtcagctttctagcaaatttatctgtttttctacatcacactaaacccggttcagaatgggtacaaaagggcatagagagggaaataatagacactgaggactccaaaaggggggaatggggaaggggagtgaggggggaaaattacctattgggtacaatgttcactattagggtgatgggtacattggaagcctaaactgcaccattgcaccatttgtctcgaactcttgtcctcaggtgatccacctgcctcggcatcccaaagtgctgggattacaggcgtgagccaccacacctggtccattgcaccatttgttatgtgcaatatatccatataataaactgcacagataactcctacatctatttttaatgaaaaattagaaaaaaaatggaaaaatctggttcaggaacccaggcttctcctctctcttgccctccctgctggggtgcactctggcagcaaacaattccccctggcctgtgcgttggctgtgcccaaggctccccactccgtctgcagggtggcctgaggggatcctgctggagcctccatccctcagcaacctgaggcctggaccctttctttctagcatgtgtcaccgccctgcatgagggccacacattcagagcttcatcagcatccttcaagcgagagctcagattttcccgttccatgtctgccctccttatgccccacatgggcaagatctgccctagcttgctgttctccaatcccaagcatgctgggcccaccttcctcctccacccatctcactcagtcctaggcctgggtttgcttgagctctcaaactggcagtcccagggatgtgtgcgggtgtgtgtgtgcacacgagagagacaaagtgtatttaaacaattttacaattttgaattagtttatagtgttttaaaaccaagagctttaatgcctcctcttgacaagttgttgttgactgtgtgctatgattcaggccccttttcagaggctgggaatacagaagtcaacaaaacaaggacatggccaaaaagaaactgacattttacaggtgtttgcattagaataataaaaaaaattcctgcttctcctaataatggaacatttcatccagaatgggtacacatatcctacctggcaacagtaagaatggatcccagatcagtggtgacctgttgaccaactgttgtctccgcaggcacctgctctgaacatggggatgtttttgtggactttcctcctcccttggtacctgcttagcataagccatgctcagttgggaggttccaggtcccaaacaggtaagccatcccatctttcctggaagctccttccaaggagattccaaaagaagcaagtttacctccattggacaaacagtcatctgtcatcaaatctgattcattagaagagcttagatttgcaagtgtcacaagaggcaactggaggcaactcagaggttcctaatctcctttagatcacctcttggtgtctagattatgtattatattaacacaaaccacatgcactctctgctgtcttaatcatagtattccattcttacacttagttcccaggtaaatctttctagccttaatcactgatgatctgagtcccatgagattgcagaaaggagcttgaccagttgctttgggaccacatatcacagatttatagcttccaattttacaataaagagctcgtaaaaaaaatcacccatatgcttcgagtccacagcctgacccatgttttctctgaaaatttcttatctgtaacccaactcctggtaccagtttctgtcttagttattggtttggttgcaaggagcagaaacttttctgacaaaaaagaaaacagtaaaaaaaaaattgtgaaaagggaagtagggttatctctctgatatcaaagtttatacatcccctggacctcccagggcattaaaaacaagatctgggaaactaacaacaactaaagcagccacgatgcttctttttgattctctgagcataactatatcattgttttctctttattgtttatccattccaccatagatggcccaagtgtggtcaccaccatgtatctgacttttcattgcctcctgggtcaagtgctcaagaaaatctagtgcaagattgagactcagttctaaatttgcaagggtaattcttttttttttgatagtgctgattttctttttttttctttttttttattatgctttaagttttagggtacatgtgcacattgtgcaggttagttacatatgtatacatgtgccatgctggtgcgctgcacccactaactcgtcatctagcattaggtatatctcccgatgctatgcctcccccctccccccaccccacaacagaattcttatcctgattcctgaatgtggtcacagagctggttctgggttgagctccttactcctatgttcctaatgggagtgtgtagccttgagttcacctatgtgtctctgtcccaacaggtagtagaaatggaggtctcctgggcagcagtggtctcttgggtacaggacttctcaagaatggccaggtgctcggcaatggtggtgttcttggcacaggccttctcagtgggaataaccatcaggctggggccaacagtggttccccaactacaagagttgctgctcacctctctgagccaaaccaccttgagaatgaccaggaatacatttatctgagttcccctcatgccgaagatgccactgagtacagcatcaagcctgggaaatccagtatgttccagatgcccactctgctgcccacacccccagtgagaatggctgcttctgcccctactccatctgtgagaatccatgtgaccaatcaagacactatgggtaaacttggtcagagtgagatgggcggtccaggctctactgacaaaagtgctgtgatcagtcaaggatccttaggtcacaaaggaatgactacccctggacaattaagtcagaaggttataaagagccttggctactctgaccacaagtggatgacccaatctggccatacaggtgtgggtgatatgagcttctcaggcagtggtcaaccttcagatgcttcttcaggaaatgctgttgtgtctggggtggcttcacctggcagttacggtcagtatggggctgagtcatctgatggtttgggtcaatctagggcaggactaataactgatcatcctgggactgggaaaaatgatgattttggtcagtctgaggcagggttaatgagttatcagactggtggtaggtcatctggttacggtcaaactggggataggtcatatgagtatggtcagcaaggaaacaagtcatttggagggtatggtcagtctggggtggagtcaataaacagcctgagcctgggtcatctggtggcttgggtcaatctggagcagagccaatgaatggtaagtaaggggctggatcatttaggggtttgggtcaatctggggtaggttcaatgaattctcagaccggcaataggtttcctagtggttatggtcaaactgaggctgggcaatctggtggctacgatcagtttgggacagggtcatttggaaggtatggtcagtctgaggcagggtcaataaatgttcaatctgggtctagaccatctaatggtatgggtcaacttggagcagagtcaatgaacagtcagcctggggctaaaccatctggtagccatggtcagtttgggacagggtcattaggagcgtatagtcagtctgggtctggatcatctggttctttgggtcgatctggagcagggtgagtgaatgatccaactggatataggttatctagtgcttatggtcaaactggggcagggtcactaaatggtcagtctggggttgggttatctggtagtcttggtcaatctggggcagggtcaatgagtggtcagactggggataggttatctagtgataatggtcaaactggggctggattatctggttgtcttggtcagtctgggacagggtcaatgagtggtcagattggagacaggtcatctagtggttatggtcaaactgggccagggccactaaatgatcagtctggggctgggttatctggtggtcttggtcagtctggggcagggtcaatgagtggtcagactggggataggtcatctagtggttatggacatcttgggacaaagacatctgtaagctatggtcagtctggggcaaggttaatgaatgttcatcctggagatgggacaactggtagtattgatcaatctggggtagggtcaatgaatggtcagcctgggccaggaacatatgctggtgacagtcagtttgcactaggagcatctggaggatatggccaacctaggtatgggtcacctagtcattttagtcaatctgagactgtatcattgaatggtcagcccagagttaggtcatctggtgtgctgggtcagtctagggttgaatcaatgaatggtcagcttggggtgggactgtctgatggctctgttcaacctggggcaagatcatcaggaggaaatgttcaacttggagaagggacatctgatcgtgatatgcattctggggctggatcatctataaattctggtcagtttggggctgggatatctgttggctatggtcagtctggagctaagtcacatgacagtcatggtcagtctgaagctcggtcagtctagaggttatggtcaatttggggctggagtatcttttagctgtggccactcaggagctaggccacctaatgattatgacaagtctggggctgggttctacttaggtcacggccagcctgggcgtggcacccctggcccctctggtccacctggggaaacaccatctggagatcttggccacatgggatccccagtggatgataaggctccccaacacaggagtccagtcaatggcaacacactgcctcccccggttcatgatggtcaaggaggggggtataggagcaggagctggaaacacactcagtcagcaattgccaacaactgccctcaacaaagacctcctggctcaggaagggctgcttggagccatcattctcaacaaccagaatctggttagggagagagagatgctacttaagatcctcctgggcagcaggaccttacctactggaaaagatcatctgctggaggcagcagggtctctggctctggaaggactgctctgcaagggttctctggggggcctctgtggccacgggagtcttgttggcatcaacaatgttctgaagagcacttctttcgggaaactcaacagctggtaagtttaagtccttcatcaataaaacagtttcccaatgcactgatcaacaagggttctaggtgctcactatatgttaagtgttggagtctgactcacctaattggaaggcagacagtaagaaggcagcctcagacgccgcctcctcctgcaaactctcagcccactgcccagcatcccatcattatggcttcaccccttggatttatgaaggtttgtctaagcctccactaaattacaaatagcattgaaaaggggtacagcagaagctcttcccagctagtactttagttattatttaataccccagtggttaaaaacagcatctttgtatgctaacactgtaatttccaactgatgctttgaatttgacatcttaattttcctttaacatcttaattaactacaaaagtgttagttatcagctaatgcttttcttgtctaggatttggaaatgggatttagaatggaaatctaggtcaaggatacgaaggcccaggatagaagaaaagccatgttgaagtttgagtaataagtcgagaagactgggaagttctgcttttccacttcaccttgctcttcccattcttcaggctcaaaatcatcaactttgatatcatccaggtggcgtggaagaaggtctatcctttatccaacctccaactagaatttcagaccaggttgactatcaaactcccagggtgagtaacttattcatggcaagagaagccaggtggaagagaattcttggagatagtaggcagtttttttaaatgtttaatttttgtggaaacatagtaggcatatatacttatgggttacatgagatactttgatatgggcatgcaatatgtaataatcatatcatggtaaatggggtatctatcccctcacacacttatccttggtgttatgaacaatccaattatgctcttttagttatttttaaagtacaattaaattattattgactataatcaccctgttgtgctatcaaatactgggtcatatttattctttctaatgatttttgtacccattaatcatcccttccccactcctatcacctcactaccctttccagcctctggtaaccatccttctatcactatgagttcaactggtttaatttttagctgcacaaataagtgagaacatgcaaagtgtctttctgtgcctggcttattatacttaacataatgatctccagttccatccaggttgttgcaaataacaggatctcattatttttatggctgaatactacttcattgtatatatgtaccacgttttctttatccattcatcttttgatggacacttaagttgctttcaaatcttggctattgtgaatagtgctgcaacaaacatgggcgtgcagatatcccttcaatatactgatttcctttttaggagtgtatatactcagaagtgggattattggatcataaggtggctctatctttagttttttgaggaccctccaaactgttctacatagtggttgtactaatttatattcccaccaacagtgtacgagggttcccttttctccacatcctcgccagtatttattatttcctgtcttggataaaagccattctaactggggtgagatgatatctcatcgcagttttgatctgcatgtctccaatgatccatgttatcaagcaccttttcatatgcctgtttggcatttgtatgtcttctttacagaaatgtgtattcagatcttttgctcattttcaaattagattattagatgttttcctatagagttgtttgagctccttatatattctggttattactcccttgtcagatgggtagtttgcaaatattttctcccattctgtgggttgtctcttcacttcgttgattgtttcctttgttgtgcagaagcttttaaacttgatgttatctcatttgttcacttttgctttggttgcctgtgcttgtggggtattactcaagaaagttttgcccagaccaatgtcctggagtttccccaatgtttccttttagtacttttatagtttgaagttttatatttaagtctttaatccatttttatttgagttttgtatatggtgagagataggtgtctagtttcattcttctgcatatggatatccaattttcccagcaccatttattgaagagactgtcttttccccagtatatgttcttggtacctttgttaaaaattagttcagtgtatggatttgtctctgagttctcgattctattccatagatctgtgtatctgtttctatgccggtaccatgctgttttggttattgtagctctgcagcataatttgaagtcagataatgggattcttccagttttgttccttttactctggatagctttggctatgctgggtcttttgtggttccagatgaattttataattatttttctatttctttgagccatgttatttgtattttgatagggattgcatacaatctgtagattgctttgggtagtatggacattttaacaatattgagtcttccaatccatgaacatgaaatatctttcaattttttggtgcctttttaaatttcttttgtcagtgttttatagttttcattgtagaaatctttcacttatttggttaattcctaggtatttaattttatctgcagctattgtaagtgggattactttactttaatttctttttcatattgttaactgttggcataaagaaatattacggattattgcaagttgattttgcatccttcaactttactgaatttgtttatcagttctaatagttttgtggtggagtctttaggtttttccaaatacaagatcatatcatctgcaagaaaggacaatttgactttttctttccaacttggatgccctttatttctttctcttgtctgatatctctagctaggacctcagtactacgctgaataacagtggtgaaagtgggcatctgtggcttattgcagatcttaaaggaaaagctttcagtttttccccgttcagtattatactaactgaggatctgtacatatggcttttatcttgctgaggtatgttccttttatacccagttttttttgtggggggggggggtttatcgtgaaggaatgttgaattctatcaaatgttttttcagcatcatttgaaattatcatatagtttttatccttcattctattgatatgatgtataatactgattgatttgcatatgttaaactatccttgcatccctgggataaatcccacttggtcatgatgaatgatctttttggtttgctagtattttgttgaggattttacatcaatatttatcagagatatagagataatggcctgtagttttcttttttttgatgtgtctttgtctgggtttggtatcagaataatactgacctcataagaatgactttgaagtattctctcctgctctattttttgaaatagtttcagtaaaattggtattagttcttctttaaatgtttggtagcatacagcagtgacaccactgggtctcagcctttcttttactgggcgatattttattatagcttcaatctcgttacttgttattggtctgtttaggttttggatttctccatggttcaatcttggtagattgtgtgtatccaggaatgtatccatttcctctaggttttccaatgtatcagtgtatagttgctcatagtagccagtgatgatcctttgaatttctgaagtatccgttgtaatatctcatttttcatctctgattttatttatttgagtcttctctcttttttcttagttagtctggttaaaattttgttcattttatttatcttttcagaaaatcaacttttgtttcattgaacttttgtattgttttcttcatttcagtttcatttatttctgctctaatctttactatttctttttttctattaacttttggtttggtttgctcttgctttgctagttctttaagatccatcattaggttatttatttgagattttcttctttttctgatataggcacttagagctataaattttcctcttagtacaactttcactgtatcccataggttttagtatgcggtgtttctattatcatttgtttcagtaaatttctcagtttccttcttaatatagtcattgacccactggtcattcaggagcatattgtttaatttccgtgtgtttttaccatttccaaaattcctcattattgatttctcatttatttcattgtagtcagagaagatgcttgatattatttcaatttttaaaaatgttttaagacttgttttgtgacctaacatatggtctatccttgagaatgatctgtgtgttgagtagaagaatgtgtattattcagctgttggatgaaatgttctataaatatcaattaagtccatttgttctatagtgcagattaagttccatgtttctttgttgagtttctatctgaaagattcgtccaatgccaaaagaggagtgttaaagtcgatctctcagctttatatacctgggtgcacaagtgctcagcaaccttaggactctaccaggaaagcacacgccttccctgacagtgccctgcctatagcgagtgtggtgtgctcccttttctgtgctcacgtcaagagatcctggacaggatctctgtcaaatcacttcccatgccatgttgtaattgcctgtatattgcctgtgtgagctctacaggagcagagactgccttagacttatgccttagcccacgggagctctgccaggccaccatccatgttcacttaaagcccaagggcgcctcagtcagcttgtggtgaatgctgcccatgcctgggactcatccttcagggcagtggcctcccgtctggcccagtgcaggtccacaaatgtctaagagcccaggtctggatttggggaccccaagagcctacgtggtactctacccctctgtagccaggctggtacctaaggtgcaagatggagttccctttatgtttccctcttcttttttcaagcagaaagagtctttcaccattgccaccatagctgagagtgtactgggtctcacctgaagccaacacatctcagagtctcacccaaggctctgacatagcacctggatatcactgctggttattcagggcctaagggctgtttattcagcaggtgatggatcctcccaggactggctccttcccttcaaagtagtaagttcccttctggcccaaggtgtgtctagaaacatggtccaggagctagggcctgaaacgccagcctcacgactctgcctggtgccctatcctattgtggctgagctggtatccaagatgcaagacaaagtcttctttacttttcagaaggcagttttttaacaactgacaaaatggcctttggttattcttagcatttgctgacaattcttggcaatatctgcctaaacagcttcttagagatggctgttaacaggaagttaggtgtgagattaatttttttctttttctgctatttctttatgtcttattgtaacaaacttggggagaaaaataaaatgcggcagaaaaaaaaaatctctaatctggatgggcacggtggcttacgcctgtaatcccagcactttgggaggccaaggcacgtgaatcacctgaggtcaggagtttgagaccagtctggccaatatggtgaaaccccctctctactaaaaatacaaaaaattagccaggcatggtcgtgggcacctgtaatcccagctacatgggaggctgaggcaggagaattgcttgaacccaggaggcgatggttgcagtgagccaagatcgcaccattgccctccagcctgagcgacagagcgagactccgtctcaaataaacaaacaaaaaaaatcactaatcttgcagcttggagacaatgactattaacagttttgtttgcttctttccagaccttttccagcactattttgaatgtcaataaatattccatacatagatgcaccatgatacatttttaaccattctactgttagatacttgggttgttttcaattttcacgcttataaataactttgtgattaatatcttgaggaataaacctttgttcatatctctgtttacttactaattctcagaagggtaatttatagcttttgataagtattgccaaattatcctccaaagagatgacggtggtgataaaacatgaccaatgttactgagtgcttaaaatattctaggccccttgttaagggcttttatgaattgtctcatatgatcttcaccagaaccttagaaacgaggtactgctattctgctcattttacggaacaggaaaaaaaaaaaaactcagagaggttaaagtcaattgtgcttggggatgtggatgtgcacatatctccagaaggaggcatgaaaaacatcggttgggtaagcatagacacagaatacacaaagaaagacagaatggaaggaggggagaaagggaggaagggaggaagggaggagggagggaaagaaggagggaaggaagggaaaaggaaggaaggaaggaaggaaaacattggtgaggtgtgtgatctcaacagggttactgggtagcgaggggacattggtgggggccaggctcttcactgtacgtttttccatcttttgaattttaaaccacagcaatgtattccgtattcaaaaataaactaaaacatttacttaactcacttcctatatacattcaaaaacaaatcaagacgggatgtggtggctcacacctataattccaggactttgggaggccaaggtgggaggatcccttgaacccaggagtttgagaccagtctaggcaacatagtgaaaccccatttctacataaaatttaaaaattagccaggtgtggtggtgcgcacctgtagtcccaactactcaggaggctgaggtgagaggattgcttgagcccagaaggtcaaggctgcagtgagttgtgatcacactgctgtactccagcctgggcaacagagcaagactctgtcaataaataaataaataaatttaaaaatatatactgaacagcaggcatcatttaaaaaattttgtatatgggccacctctctcacacacaaatgccagtacttgtttctgagtttgagaaaagcctttagaacatctccagacacctgctctgggaggagagtgttgcttacatcactgaggtggagaagaagagaccagcgatttgtcctggacctttcctggaactctgggtgcaccctggcaggtgacatcccaggccattcttgctgagccctccctctggtgggtccctgggctcagctcagccagccctcctgctgtgtgcacaggttgcttggcttcctcagtggctccacagtggacgtgaacatcatggctacctttgtgctctcccagaccaagctgggtcaaatctctcttgacttgcagaactgccagccagtcttcactaggatccacatgcgagcaaggtaggtactgtgcagagcgggctgagtgccctgcagggtgcagtgcggggacagtgccatgctgcagtgatcaccaggcttactggggccagagctccagcaaactatgccaccagaatacctttcttcttatttcagagtcccctcttctgcccaggtttctctaccagggaggttagatttctaagcaggaggaatgccttctttctgaaagcacatgccttccttgatagtgcccctgcctataaggagtttggcatgctcccctttttgcacttacatagagagatcctggacaggatcactgtcaaatcacttcccatgctgtgttgtaattgtctgcatatgcctgcatgagcactataggagcagaggctgccttagatttatcatttgtttattcaacaaatatggagccaggtaggcactgtgttgttcctggagaacaagacggagaaagatggatggatggttaaatgaataaatgaatgaaagtgaggatgggaggaggggtggctgggaggatggatggatggatggatggatgatggttggatggatgaatgaaggatggatgagtaggtagatggatggaggcaaggatggatagagggatgaactgaagtataaatagagcaaatgatggactatagtagactttagtagactcccctgaaaacttcagtagactaccctgaaaagactttagtagactaccctgaaaacctaagcttggctcacgagatgaggtctaaaaatacatgcttacttaatttaagagccatgagctcagggttaaccaagttctatagcactatatttcaaacagatcattctctaaaaaagcatccagaggctgggctgtgtacccaatcaccatgatgatctctaaggtcattatttcatggttgagaaggatgctgtaagcctcagggaggtgctataaatcaggagtgctacagttcaatttcatcatgggtttaacaaggtaggcaggctaacctgagagttcaaccacatgttctctgagatcctttctaactcccagattctgaattcaatgccttagaacatgggtcacatgctcaaatgcctattaggggtaggaaagtggcataaattagtaagcggggtccagtttaaggaaatacaacattcaagttcaatttcaatttttgggatgcaatagagagtggtgggcactgtggcgaattggacagcacatgtctcatctgaagtgggcagcctctccttggctccagttgactatggccatatgggaagatgggcccagtcttgccagttttctgtattttgaagaaactggaacgtaaattttgaaacttcactgtaaaaatttaaaagactatttttgcaaaagaaaacacacctgtgggcctcgtgtggcctgcagcctgccattctacagtctctattttagaacatgatttctaaggagaaatgccctctaagtgccttagctcaagtcacaaagaatgtaaaacacaccccttgtttaagagaaggcaggtaccctgtggtaatgggttgaatgcactccagccaatttcttttctttcactcatttagtcttcacaacaaccctattttacattttatagataagaggcacagagaggttatataaattggacaaggtcatatagccaggaaatagtgatgctgggattcaagcaatctgtgtttttaactattctggtagtttgagttaatatatgccatgaattgagccgggcgcggtggctcatgcctgtaatcccagcactttgggaggccgaggcgggtggatcacgaggtcaagagatggagaccatcctggccaacatgctgaaaccctgtctctactaaaaatacaaaaaattagctgggcgtggtggcgcacgccgtagtcccagctacttgggaggctgaggcaggaaaatcgcttgaacctgggaggtggaggttgcagtgagccaagatcgcaccactgcactccagcctcgcgacagagcaagactctgtctaaaaacaaacaaacaaacaacaaacaacaacaaaaaaaaatatgccgtgaacttagactagtccccggagcaaaggaaacattttgtaacctttagctataattgttattgtttctaatgctcctactccccagcctgctctctgcagtgatggagaccatgttgaaatggatcctggatacctccctacccaacatggtaagtttgaaaagggaaactaggcagaccctttgcagctgaagtatggaggggtagccaagatgggagaggcagccatgccagttttattcctgggctctctaatctctcagagttttctttcctgtcctttttatgagtccctgatactgggcaaggcggagagaaagggacatttcatgagggacaactatataccaggtagtttacacctgtggaagatgaagatttgcattgtgttacaaattctgatagaatcatttaatctcatctgataaatttattcttcaaagagaaaggcatacagattttttcttatcaagagaattcagcatctgtttactggttacaatttgatcaatgagctttccaccagcaagttcattattacaaggttggtaaacaatcagcttcttctggcaaacatgggtttacaacttaaacaaacaatcgcaattccctacaacagcctaataaacgcagtgcctccatcacaaatatgtttggattaagggtataggttgcaatgcttgcaaaataacaagaattttttttttgaaaaagagcactgtgtcctgctgaccaggtttggattcctccaggagcagacactgaaacaagggtttgaatgcaagcagtttatttgggaggtagtcccaggaagtacaagtaggagagtgaggattagagacagggaagaggaggcagttcatatggtgtgatatcaagccagttaccattatgagcgctggagcttagtctccttggggaaacctggttcagtgcatggaacatgccttagaattaccccacccaagggtgaggaagctggggtatttatataccaactcccatcagtctttggttgagggctgctcctgggagcattgattccatggtacttccagcctatgcacaggcaggaaaagcaggttttggaggctccaatagacagatgcaagtgggagctggactcaagtggcaaaggaagggagtatggggaggtatgaacaatgttttcctgaccttcttagcaacccagccagaaatccaattttatgatgacaagctagagaataaatataaatttcacctaaagcatttaccccacctgaataaagctatttatccttggttctcttacactgttatgtgaatctccaacttactcccttatcttttaactaaaggtaataattagctcttaggatgcactcacaaaagcatcttgtcaagtctttttcttaaaagtttctcattaaaatgccatcacatctactgatttgtgcttctgttctttaaatttgtcaaacattgaattaatgcatttgaggcttatcagaatatcctataattggctgggcaccatggctcacggctttaatcccaacactttgggaggctaaaaagggcagatcacttgaggtcaggagttcaagaccagcctggccaacatggtcaaaccctgtctctactaaaaatataaaaatgagcctgtcgttgtgacaggtgcctgtaattccagctacttaggagggtgaggcaggagaatcacttgaactcgggaggcggagattgcagcgagctgagatcgcgccactgcactccagcctgggcaatagaacgagaccccatctcaaaaaaaaaaaaagaaaagaaaagagaatgctataataattaaatatttgaggcttataattttgtcgcccacatggccatgctatgaggtgtagactataattccttccatttttgagatgagaaaaaaggctcagagaggtggggtgacttgcccaaggacactatataagtgttagctgttatcattgctaaatagttcattgctgagtggagctcaaactgattaaaacattggttctcaactcaaggcaagtttgcatgccaaggggtgttggcagcatctggagacatttttggttgtcacaactaggggagtgctcctggcatctagtgggtagaagccagggatgctggtaaaaatcctacagggcacaggacagccacgcatgacagagaatgatctggtccaaaatgtcaatagtgccaacactgagaagccctgaatgaaatggttgatgttgatggtggtaatgtgatgatatttctatcatgcagaaaatggcagagctcagactggattagattgatttagtcccttgatggggacctggaggcccatggagagataggatctatctagggtcacacagccaggtggagacagctgggctgcaagggtagcccaaggctcctctcaccgagatctctgttcctctgtatttcagctgtgcccagtggtccagttctggttctacattatctatcaacagttgaacgttctgaaaagtgagttgtgccgatggcttgagaccaaatctgtttagaccgttgcatacccccttcccccactcctgctttctccccttcatggctgccagagagatttttctggatcacatctctgatcaaaatcttctgcagatgaccaggaggatcaagggcacacccccaaggctggcagttgagatctctcctgcaactgctccatccagccttagtcttgtctttcttcttgctgctccagctggttggcctcagccacccccatacatgccagccccttttgagacacaatggctttgctcttggagacttcctacaccctctttctgtgcctggaaaactcttttaccccttcaaggtgtgactcccatgatttgtccttccaaaacctttgcagatctctccaggcagaaggactccctcctgaggacttctgcaggactgtgcacacccatctggtattcatcatatagcttagtaactctctgtttcttggctgtgtctttaatctagaccagaagcttgttaagggttgagactttgttgtactctctcttgtatttgtctcatagtccttgctgggcacagagtagacccaccatgtcaactttgttggcataggaactggagatgaaaggaagaaatgtggatggacagaagtatgaatgaatgataaaatagaaaaatgaaaagatgaatggaagaatgtatggatagaagggtggatgagtgatatttaaatagaaggaagtatggatgtgaaatgatggatggagaacaaaggaagggagggagagaaggagggagggagggagagaggaagaaagggagggagagagggagggagggaggaagggagggagggaggaaggaaagaaggaaggaaggaaggcaggcaacttggataaaaggtgaagaatatgtggatggatggatgggagaagcaaagggagaaagttggagaaaagtatggaaagagaaggaaagaaggaaggttgaataggaggatgaatggattaaagtgtacataaatggtggttggagaggtgagtgaatgaatgaaggaaagatttattactggatgtgtgggaagatgaatggtggctaggtggatggataaataatagatggattaatgaatgggtgaaggaagaaaaaagctatagagatggatgaatgaaaaagaaggaagaaaaaaaggaaaacttggtggctgggtggatggatgggaagatgtgtagaaagatgctggttaggcaggcagtaaggagagcttcatggctggacaaggaagagagatggattacaacatgccaagttgagaacgctccactgtctgagccagaagacagtgggctttatagctgcaatgtaacagtttgggaataatctccgtctcctgcataaatctatggatgacaagggaaaatgaatgagcttcataagtctccacctcagttgacttatctcttatgtttctcttgtccgcccttcccgtcgccccctgtctccctctgtctccatcagatgtccacttactcagattatttagggaccacctctcacctctctcccaaatacccctgttgtctcagcagtatcactgcctggagtttcaggtaggagcagctgcttctctcctaaggaatgttctgggattcgcctctgagattttcttcacatctgaaactagctcaatggtgccccatcactcacttgagtctcccaagcaaatgtgcccacagctgtccccttaaaagagggagtatgtgccatggcttcagagccaggcaggctctgcttctgcttgactgtgcaaccctgggcaaatccctttacctttctaagcctcggtttcttcctctatcaggtgaggatgattagcattccccatataaagctaattcatcacttgcaagacgtgcattttccttacattgtaaatatcttaaattggaatgcattgtatattcaatggcatttcataatttaattggcaatttaaaaatttcttagtggcacattaaataatgcatatcttaatcaatggtattctagtgtgtgtggaatataatatgatgattagatgagaacatgcttggttatttacctagcacagcctaggagctcaaacactagtggtttattcctctttacctttattattattattttttgtatttatttatttttgagactgagtctcgctctgtcacccaggctggagtgatgcaatcatggctcactgcaacctccacctcccaggttcaagtgattctcctgcctgagcctcccgagtagctgggattacaggcacgcgccaccacacccggctaatttttgtatttttagtagagacagtgtttcaccatgttggccaggctggtctcgaactcctgacgtcaggtgatctgcctgcctcggcctcccaaagtgctgggattacaggcgtaagccaccatgcccaacctgcccttagtttaaaatattaaattaagtgagttacttggcatcacaatattcgggggttttaagtccatgatgggcctgcatccctttcctctcagcttctcccaagccttagcataatcctgccggcccctctaactcacagaaattcttgaattacagagaatgtgttttgttccacaaagtagaaccttcagggatcttggggcagagccatctctgagtctcctttccttgtccataattcttatattgcaaggttgttgtgaggattaaatgagaggcacatagtctagcatacaataggtgctcaactaatgtgggctatctggttttttccccaggacaaatacttcccaggctctttcattaactggctgcttgaaagtaagttttgttttctcatatccaccccactgtctcccagtcctgcctccctcttcagggcaggacagtccttcctcaaacattggtgtaaaaccgtaggacctcagagcacctacctgacacagaatttgtgccctgatcaatagcaccaaagcagggtttctgaatagtcaatttcatggtgaccagtgttgcagtgtggttcctgagatagcccactccactatgattactgttacaatgcattctagggccatcctattccgtagtgattcttgttattgagggatctctggagtgtccatcccatagtggccagtgttaggttcgtgggatagcccactctacagtgatcagtgttagggtgggtctcctgaactgacctactgcgcagtgaagggttttatcatgagcttcctgtgatcacgcactccaggatgactagtcttctggtgaaattgctgaaatttcccattccataatgatcagtgctgtgggattcctgggatagcctgccccacagggaagactattatagtgaaattcctaaaatatttcactactgtggtctgttattgaaataactgactccgtaaagaaggcattaccatcggactcaggactagccccttcccttggtgttaaagtgaaacgttatggttattacggttttggtgttatagctacgttcctgggctatgccactttttggtgaagaatgcagggctggaattcctgggatagcccactgctctattgtgagaagctttccagaactgatttctgagtctggaggaatttttaaaaaatcactgtgctttcattacatttcccaaatctcctatgcttactgctgaggcaagagcggagggaggtaggcaaagaaggagagttgtcctggaccaaacttctggactaactgccgttatagggtgccttgtgccacttctcagtttctcaccgaggctgggcaccaggcaggaggcaggagaaaagatgggacactcctctcccccaagcaggcggggaagcctattgttcccctggggagacagggaagcttttaagccctcttgctgtttctctgggacttctccaacattatggtgaaagccagaaaaggtgagcagaaacagccctaagccaggcatcctgagacctaggttttaagacccagttcagacactaactctctgggagaacttatgccagccccaccctctctctgggcctctctcctctcatctgtaaagtgtgccgagtctccaaaggcctttctttcaataagaatgttgggaaggtgaaaagcagggcaaaaccttggccgcaacaagtctttctcatggtggcgtcttctaatgtcttctgtgctgtcggttgcagtgacccctcagtcttcctatttctaggatgagcatgggaccccgccaagactatggtaaggatgttcaaacgctggagcatcactgtgggactcccctctaagtggctgtgaccttgatctacccaccaatgatttcccgcagccaaaccacaaatagttccttcattagagcttatgtttggatatgcccaaagctgataagctgggaaatttcccaagggaaggtaattcagcatggagctgatggaggtagaagagcctctaagaagcagactaaaggaatggtgcctgacaggggaagggaagtgaatgccccttccacttcagacagatggtcggatttatagcttaggatttgagtattcttgaggaccatctgaagctgatgagatgttccatccagcaggtcaatggccttgcagtaagatgtatgaagccaggttacaagcctgactttaagtctgttagaactaaaggaagtagaggccaggcatagtggctcctgcctataatcacagcactccaggagcctgaggcaggaggatcgcttgagcccaagagtttgaggccagcctgggcaacatggtgacatcctatctctacagaaaatacaaaaattagctgggtgtggtggtgtgtgcctgaagtcccagctacttgggaggctgaggtgggaggatggcctgagcctggggaggtcaaggctgcagtgagccatgattgcaccactgcactgcagcttgggtgacaaagcaagaccctgtctcaaaaaaaaaaaaaaaaaaaaaagacctgaaggaaattggtgctaaatgtaaagttacctggaacccttggactgtctgcatttccaattaaccacatctctgcactctgctttcctctcctgcataagcaaggtgctcccaagccactttctcaatgagtaaggttcactttaggatctgccaagggaaataaagtaaagaatgccaagattatatacatttagaattccagaaggtcagaatcttggccttagagatcctgggaactccaagaccttggcaatgggtgggaatgagcagaggtgctggacctgctgggtccacaggattgaagccctgcatcctttaattgcatgaaactctcatgatgcagtagtgtgttgggaactgggtggcccctgtcatggctttttggtgtggcagtgaaagggacaggctttagggtcaggtagacctaagttcaaattccacccttccaatgactcggaatctcaggttcctcttccacaaaatgagagtgagaatggcacctattttataggaaaattgtgagaaaatgcatgaagaaagcctatgctcagagcctgggtgacagcgtgagatgctgtctcaaaaacagaaaagaaaaagaaaaagaatgaaaggaaatgagcgctaaatgtaaagttacctggaaccattgcatttccagttaaccacatctctgcactctacctttcctccagagaaccagagggtggtaaagcagctctacctcaaacaccccaatccctgtggtactaatgggggaaacagaccagaagggcatggaagactcagcgaagacactgtagggtgccccctgcctgaggctccggtcacctctcccctcctgcagctcctgcctgctgtcaagaggacctgggtgtgaagcccagctctgcatccttccagctgtgcagaagtgggccaggcacctcacctcactgggcctcagtttccttgactgttaaacaaatatgaccactggcagattgtctaaacaccaccaggcagaggggacaggcagcttgagctaaggtgtggagtggggaaccgcaaggggctgtgagaacccacaatcacactctctgcctctccctgttccccgtagacaagcacagtgacagaagctggacactgcctgtccttccacgtctctcccgctgctggccacacacagggagcagcaggtatggcctgggcaccggcagggctcccaggcggagggattggggtgagagcaggcacagttctcagattttgccacaaggtagagttgtgaccctgctactccatgtttctcatacctgttagaatttaaggatatttgcataatgcagcattttatttttatttttattttttatgccaggcactgtgctgggcatttggctttcaggatcgcatgtgattttcatagccacctctcaaggtcagcagtatcattatctctattttagagatgaggagactgaggttcaaagtggtgatgggactgcatggatggactggggagtctgactggggagtcagaattcggctcaaatcccagctcttcagcctatcaggacacataacctctcgtgcctcaggctccaaaggggaaaaatggggccaatgatagcaataatattttgaatagaccttagctctttgtggattgtttatcctatgcccagccatggatcatttcattccgccctttaccccccttaagaggcagctgttgatacatattcattctgcagatgaggaaactgaggcccagtgaggttagctgctgcctggcccacttctacacagctggaaggaggcagagctgggcttcacacctagatcctctggcagcgagcaggagctgcaggaggtggtgggtgtctggggcctggagcaggggggaccctactgtgtcttggctgagtctcccatgccctctggcctcagtttcaccactgataccacagggattgggatgtttgaagtggagtgccttcacggtcccctggttctctggagaaaaatgcagtgcaacagccaagaagccatatccaggaggctcctggagttgcgggggtggaccctgcagcaagaagagggccctcagctcctgggtgtctccccatgccccagccaaagccacccagagctcagtccacactgggcctccctagtgtcacttgggtgcatggctgatgacacatatgaccatgtttgttttctcaaccttttcgtcaggaccgcctttgtgaacaacctgagggccctgcaggctgcggggagagtcacgtggagcctgagggtggcacaaggaaggcagagaagaagcaagtggagctggccttcagggttcctgagtctccacaggcccagggcacctgttcttggtccagcaataaatgctcagatggatggcgaggacttgggtcaccacaggatccactatgggaggctcctgggaaatatcaccatcacgacattcattctttcaggcagtaagcatagccaggtcccatttgatatgaatctgacctgcaaatctgcaacagtgtcctgcaacatattaagttttacatggtgaccagaaagttaaataaaacatcccctccccccaccttttccattgttaagaacacacacctaacttgctcaagtccctcccttctcaggaagaataaaggtcccttctgtaattccacactccctccaccaacctccttccctctctcgtcccttcgcagccaaagttccttagagctgtgcttctccaccttgaacacacaaatgagccacctgggctcttgttaagatgcaggttctagagcagttggtctgaactagggagaggccagcggtccatgggccaccctttgagcagcatgcttattttggatacatccaccccaccacccatcttgtttccactggttgccccaccaaactcggccttaccaggtcctccgtgatcaccaggtagaggaagtcaatggatcatagatgaggtcagcctcatcttgaccatagcacacataccacttcctcctccatgaatccagttcttcccttggccttactcccctggctctcctcctcctcctcctctgaccattctacctctgcctctttgcagatgtaatattttcaaatcggccaaccagtggcttccttcaccctggccactttggttggttcattgctccgcatgtaaccccagcaggaccaatgggaatcagtcctagaacttgtgaagagatattaggaaagacatactttcttctgctagactattaagagagaatgtggacctgaatctgttggtggccatctctgccacctctttggggaagtcagtttgaggagaaaccccaagccaagtcatggaaagaaacaaaggcctggagatttcttttgagcacctagattcagccatgcctgaaacccgttggcctgctagttacatgagccaatgactttctttcacatctaagtcactttgggttgtgttttcaattacaaatataacccaaagaatcctgacaaatgcaactgacaaacatttcagtttattggcaagccatggtgggaaaccagagatgaaccccagagagaacttggcctcctggagttgacaatggagaagagacagctgtgggtgtgtaggcaaggaagacacctgttcaaaaatgacaaggcagaacgtgagaaaaggtcagctgggtggctcaatgaaggctttatataagaggtgcttgcaggatggggagaatttgcaggggggtgacatcctcagacctggcccttggcactgggaagagttgatgcaaagaaattctgcgaggccagagaggaggctttgggaattgtccagcagaaacagagaagtctgaggtggtaagccaagaccccacagaaacaagtccttcgagggtcccggacgaaaagacaaggagctatggtacttctcccatggttttgatttttttgtttttttgagatggggtctcgctccgtcgccgaggttggagtacaatggtgagatcttggctcacttcaacctctgcttcccgggttcaaatgattcccctgcctcagcctcccgagtagctgggactacaggcacctgccaccacacccggctaatttttgtattttcagtagagacgggatttcaccatgttggccaggctggtcttgaactcctgacctcaggtgatccacccgccttggcctcccaaagtgctggaattacaggcatgagccactgtgcccagcctctcccatggtttttattcccccttttgattgagtggccaccacacgatgctccaggattctgcattccccctttaatttaatgcctccccagtccctactagccaggattagcaccgattttagagagcagaagacactgtctcagacagcggccatgccttgcctaacatcacacagctggccagtggcggaatctagaatgaggctctgccctctttcccacccttaatcctgccgctgggcacagcacttctgagttatctttactgagcacttatgatgtgcccgacactgggctaactcttttccaggcttaagtcccagatcagctatgtcaggcagatgatcatggtcaccattttgcaaatgaggaaatgcaggcccagagaggcaatgccaccattccagagtcacacagctagaaagcagcagggttaggacccaaattgaggtctggctggttacccaaagcccctgcaagataaatatacccagacttagccacgttttggaatcctcccatcatttgtcttctacatgatctgtctccacctaccccacagtgtcatagcacttcctctttcactcccaaagtgctaacttcgaccccattcagtgcttaaaggaaggaccttcaccagggctgggcactgtgccagggacagcagctccccatttgcttggggccatcaatgcacagaaaatttgcaagaactgtacctgctttgtggaaagtaattgtcagtgtgcgtgttggcctctgcccctgctggtggggtctaaggatggacacatgtgggggtgctctgtggggcccagagccccacacaggacaggacccaggtgagacgctctgtaagtgtgtgacgaatgaatgaatgacaggatgggtgggtggagggaaggaaggactcttcttgtgattctgggtctcatctacattcatctattcagtctgtggattaacttgcttttctcactttaattaattgtggtatttattgggatccaccaaaagccaggccccaggctggctgctgaggacacacagatggcagaatcatgatccccaaccttaaggagccccagtccagcggaggagaaagggctaacccacaacccttcaaccagtaagcttttatgaagggatttctctgacacaggcttggggctgggggtgctagcgcaatggagatgaatcgaaaggacccacacagcccagggaggattccgactgttagaatataaatggcagtgctgccgggcacggtggctcatgcctgtaatcccagcactttgggaggctaaggcaggcggattacttgaagtcaggagtttgagaccagcctggccaaaaggtaaaaccccgtctctactaaaaatacaaaaattagcagggtgtggtggtgcatgcttgtaatcccagctactcgggcggctgaggcaggagaatcacttgaatccgggaggtggaggttgcggtgagccgagatggactttgtttaaaatatatatatatatatatgtacagtataaatggcagtgcactgtgagtagctcagagcatggactccggagccaggttttctgagttcaagccccagctctgccacttactaggtgtgtgaccttaggcagtacacattacctctctgtgcctcagtttccttgtttataaaatgggaataagacagtccctgcctctggttgctgggaggagtaaatggagagaatatgccttcttgccagacatgggccgatcgaatcagctcacctactgccctggagttggcctgtctctgggacaaggactgagcttcagacatctttgaccccatcacagggcttggggtgcccactaaagggttgtcaaaagcatgagtggctccagcagaaaataatttgcacttgtaaagtgaatgaacaataaataaatggacagatgactagatacagggccaggcccactttagcagggaggatctggaagatgagagagggcacagagagattgaggggccaaattccagggagtgaggtgagaacagggagcgacccagagagctcgctcatgtcaagaggcccacccacctggggaagacagaaagtcaatgcccatgaggggaaccagaccctgtgctgggtactgggacctcggagatgctgtggtcttgccctcagagagtgggactggcgagacgtggctgacctccctccctcccttcttctcttccttttctcctccctttcttcttctctctccacatcccctctctctctttctttctttctttctttcttccttccctctctcctttcctgcctttcttccctccctccttccctctctttccttctttccctccctctctctttccttcctctctcttttttcctccttctctctctctctttttcctttctttcctgccacaaacatcatttgactcctgctgtagaccagaccctgtgccagctctgggggaacgaaggtgaacgaagacaaggtgcccagacttcaaaggacccaggggaggaccctgacccggtgaaaactcctttaaattttctctgggagtgttggatgaagcattcagggaacattccatgggacaggaggaagaagactccagcctgcagtggggcaaggccccctccatctgtcagtccataggaagtggctctccatattctaaaggcaggacttgagaggggtctattagtgtccagatgtggaatccgggacttagggaaatacttgagcgctgaaagaataaactgtgtcaccagaagaaaacccggcaaagtcaaaattaccaaaagttgaattaaaggtcttcagactgtaacattgtgacaactttattaattgctctatttagcagtcacaggaaggacagtaacgtgtgaacaggttttgttgctttgatctttcttatttgcccagaattcctgagtaggcagttcaagtgtgagaaaccaggacctactagaaattggatggatgattcgtacttgactgatttcacaggcaaaatggtgacaagcctttcagcaattttactagcaaaataaggcaattatctttgatgggtgcaatgggagtgcacacctgtgtgtttgttatctggagaaggggtgggggctgcttctgtccacaggagaaggaaggtcagtgggcagtctggtcagctgagcaccccccagcctggctggcccctcatgcaaccccagccctgtcactcgctttctctggtctcagtaggctgcatgacctcttaggctgtttctagccagggcactgagccaggtatggaaaaagataccagcttggaggttaaggctgggccagtgggatcaggaagctgccccagctggggattagcagtcacgcagcaggtaggatgtcctagtcttggcacagctaatctttaatgcctcactgggaattttcaataagaaattcatctcgcgaccctcatggctggggcctttgtccctaagaggcaaacatcttctatgtgagaagactttgtgtaacctggagagggaagaagaggaggaggaggagcacacaggaggagttgtcactgtttctttttccggaatgactcagaccagccagcctgaacctcgggtgacctctgaggatcccaacctccccacccaccaaggaccctatattatatattatataatattaatcttatgacagatgctcctcattttattttatttttgtttgtttgtttgagacggagtttcgctcttttgcccaggctatagtgaagtggcacaatcttggctcactgcaacatccaccccctgggttcaagtaattcttctgcttcagcctccagagtagctgggattacagatgcctgcccccacacccggctagattttgtatttttagtagagacagggtttcaccatgttggccaggctggtctcgaactcctgacctcaggtgatctgcccgcctcggcctcccaaagtgctgggattacaggtgtgaaccaccatgcctggccagatggtcctcattttataatgggttgtgtcccagtaaacccatagtaaagttgaaatattgaagtcaaaccatcgtaagccgggaccatatgcgcacatattcatcagcatcttcttcgccatctttgctgttgccgtgcatcatgggcctaccctatgctaagccttcatgggtattacactaatttgacctcacagcatgcccttgaggtgagcactgttcttagtcccatttcacagataaagagcctgaggctcagcaaggtgcggtctctggcccaggtcacatggccagcaaccagcagagagagagtattcatgcccaggacagcccaagcccagtgccaggctctgagcactgccctcaaagcccctcaccatcgttttgatttcctaggtccttgcctgtccaccatgcctctgagatccaggaacagcgtgtttacccattttacagatgaggcaactgaggcctgggccaacaccaggtctcgaggtcactgcatcatgctcagcaccctgggctatgttcctgggctgggacaaactgccttcacaagatttcagcacagcccttggctctgtgcttcacaactgggggaagagcggggctcagacgtttggagaacccggtgtcaggcagccagggaaggaggtgtgacaaccattcaagaccacaggcaagactgcagcaggggtctaatggtctgggctcttggggcctggccatcaccttcctgcagccgcccagctctgtgctgtaacagtggagccatggtcagtgtaggaacagccagctcctggagccactggtcttgtcccaccgtttgcttggttgcatcattttgaggacaggccccccaggtccttgctgaattgcaggtgggtgagcagaagggcagagacctatggtgaccctgagctctgtgccagtccttcccagcctgaggccaagtgggcacccacccgagtttcctgtgctgttccgggttgacacaggcccaatgcagcaggcgttacaaccaacccaaacatcagtggccgaagcaaaaacaggatactcaggcccagggactctccctctctgctaactgacctcagcctgatatgggtggaagggtcttccctggtggcccaaatgcctggttcctgtccttgcaagtatggacaagccacctccctctctgaacttcagctttctcaactggaaaatggagctctgaaaacctgccttacagagttttcataaagactaacagaaaagtgcatctaaagtgccctttagggacaccaagcccagtgtcagcacaagcagctgccaggcatctgctgcacctgccgggtgcagacccctgggggcaggacccctgggaggctgtctgactccttgtgggccacaattctagacccatctcggtccctgtcttgctgaatgaccccaggctggtggcttcccctctctgagcctcagtttccaaatgatgacggagttagaccggatggtcattatgggtcctcctgccaggacattctccaattcattcattctcagtcttctcccagtcctcacccacaaggaccaaggaccaccccctcggtagctgcaggctccatgaggacctggtcttagtcttggcggaaagccctctccatagccatccgtttcaattcaagcatcctgggtgacctttgagttggaaatctctctctctgctcatcctggagaggggttattttccttggagtgtccttggatgatcccagaaccaaggcttgcttctgtgggcagccttccatcccatctccaccatataatagccgccaccattcagcagaatcccagcagactgtgcagtggggcaaggatttcatgagcatcctcctctaaacgcgtgagtggcgtgctccccccagtggcaccacacgtggtggtctttggaaggctttgggggcaagaggcagaggggtgggattgcttgggttagctaatattttgaatacagcagagataatcaatatatctctaaatgtgctctaaatggcaagttcgtgatgagtactcactaaagattccatttccctctgggcaattcttactcctgttcttcccatgactgtccaggtgtcaagacaaatggcaaatcagagtaaatttagagatctatagattatattaaaataagtgtcaaactaatgaacaatgcagggtcatgaggtggtctccattgatttgttcatacttatattcaacaaagatttattcgtttactgtactgtactaggtgcaggctttttactggcgcctgaggattcgacagtgaaataagtcacagtccttcctctaaggagttcacagcctggtaggaaaggtggtcaaatcatcagggaagtgttatccaagaccttgatcaggataatgaaggcagcaaggtgggactcctccaacctagaatctgggaaggggcctacagtaggcttcacagagggcatgatgtaggaattgacctaagtggaaaagtaaagaagaagaaaaatattttaggcagagaagacagcgtatgaaaaggaactttgtgtcaagagtatgggcttggagtcaagtctgacttttcaaatcccagctcctctgctcactgactgtgtgtctccgggcaagttgctgtagctttctgaccttggctgcccatttgtaaaataggaaataaccacatctatcttaatggaatgctaaatgttaagagtgatgggaactcactgaagagtccatttccctctgggcaattctcactcctgttcttcccatgactgtccaggtgtcaagacaaaagatgcttcagctttggaaacttgttctcctgtgcggcgtgctcactgggacctcagagtctcttcttgacaatcttggcaatgacctaagcaatgtcgtggataagctggaacctgttcttcacgagggacttgagacagttgacaatactcttaaaggtaaatcaacaagggtgatgaacagtgtcacctaaattagcctcctaaacactatgcctgcattaccagaggctgccaccaggggctactctttatgggcggtttactgagaaaagtggctattcaattcctgactcattcgtttatctttctagaaacaagcaatgccacaatgaatagccttttacatattatatcctgataaacgtgcataagataaattcctacaagtgggatttcaaaagttcaaaaactatgctgttgacaaataatctcctatgttaacactttctccaacagtctacgaaagtgccttttttcccactccttttccagcactgggtatggacaactttaaatattctgcctgtctcacagatgaaaagctataacttatttcactttgcattcctctaattatgaaggagccctcttcttttttcatatatttactatgtacttacatattttaacttgaggattttgtctatattcttagcatatttttcttttgggttgtttaatattcttttatggacttgtgttaattcagtgaaaattaaggaaattatccctacctagccttggtatctgtaaagctacctacctttatatttatttatacctcctttttatgctaacctattaaaataacttggctttctttttgttttatggaaacattagcagcacatcaaaaacagtttttgtaggaggaggtaacttctgcaaatggctgcctttcaaaccttgtcaagggcttaggtaactttcaaagatgcagaaaggactcacactctaatttcacagctgagaaaactgaggcccagagacagaaatgtctaaaccaaagtcacctcgtgaattatacgattagacgtagttatatcaccaattttatttaaagtgtcattctctgaatcattataactaggtagatattgtccattacagagccaagttacaatattatgattacatctcttttcttatacggtatagtcttttgtttttccttaagttagtaattgccctgttgtttctcacttgaattattttcttctcatatatacttaattattttcatgagcatcatcctgtatctatcatgacatttattattttttgagacaaggtctcactctgtcacccaagctagagtacactgccagcctcaacctcctgggctcaactgatcctctcacctcagcctccccagtagccgggactacaggtgcacaccaccacacctggctaagttttacattttttgtagcggtggagtctcaccattttgcccaggctggtctcgaactcccggcctcaagtgatcctcctgccttggcctcccgaagtactgggattacaggcgtgagccaccacacccagtcacgacatttattcccatccccctgttctccagagacctatcataaagacactttgtcctcctcctcctataagaattattgctttcttttggtgcaactgcttttggtgtcatgaagtctttgcccgtgcctatgtcctgaatggtattgcccaggttttttatggttttgggttttacatttaagtatttaaaccatcttgagttaagtttttaataaggtgtaaggaagggatccagttccagttttctgcatacatctagccagttttcccagcaccatttattaaatacagaatcctttccccactgcttgtttttgtcaggtttgttgaagatcagatggttgtagacatgtggtgttatttctgaagtttctgttctgttccattggtctatatgtctgttttggtaccagtaccatgctgttttgcttactgtatccttgtagtatagtttgaagccaggtagcatgatgtctccagctttgttctttttgcttaggattgtcttgctatatgtgctctttttttggttccatatgaaatttaaagtagtttttttttctaattctgtgaagaaagtcaatggtagtttgatgggaatagcagtgaatctataaattactttgggcagtatggccattttcatgatattgtttcttcctatccgtgagcatggaaaattaacaaatgggatctaattaaactgaaaagcttctgcacagcaaaagaaactggcattagagtgaacaggcaacctacagaaggggagatcatttttgcaatctatctatctgacaaaggtctaatatccggaatctacaaggaacttaaacaaatttacaagaaaaaaacaaacaaccctatcagaaagtgtgcaaaggatatgaacagacacttctcaaaagaagacatttatgtggccaacaaacatatgaaaaaaagctcatcatcactgatcattagagaaatgcaaatcaaaaccacaatgagataccatctcacaccagtaagaatggcaattattaaaaagtcaggaaacaatagatgttggcaaggctgtagagaaataggaacacttttgccctgttggtgggactgtaaattagttcaaccattgaggaagacagtgtggtgattcctcaaggatctagaaccagaaataccatttgacccagcaatcccattactgggtatatccccagaggaatataaaacattctactataaagacacatgtacacatatgtttattgcagcactatttacaatagcaaagacatggaaccaacccaaatgcccatcaatgatagactggataaagaaaatgtggtacatatacaccatggaatactatgcagccataaaaaagaatgagatcatgtcctctgcagggacatggatgaagccagaagccatcatcctcagcaaactaacacaggaacagaaaaccaaacactgcatgttctcattcatgaatgggagtttaatgatgagaacacatggatgcagggaggggaacaacacacactggggccatttgggggcttgggggcaaggtgggggagagaattaggacaaatacctaatgcaggtggggcttaaaacctagatgacgggttgataggtgcggcaaactaccatggcacatgtatacctatgtaacaaacctgcacattctgcacatgtatcccggaacttaaagttaaaaaaaaaaaattattattattgctctgtggacctgctggaaagctgtcattctgggactctcgttttccagtttcatggattggagccattttttctcctggattctagatttttcatttcttgagtgtattctctcattctttctagtttttcaaactcacgtgagcatctcacttagcacaatggacccctaagtcactcctagacactggtgtacaatcaatagcaattgcctggccaactggttgattgcactgttgataaataatcagtatatattattaatagtacggaggcagtatggaggaaacaagagttccctggctgtgtggctagacacgtttcttaaccatctagagcctttatttccttagctataaaaaagcagacagtgacaatatctacttcactgagttgttataaagattaaatgaaataacataggcaaacagtcttacccggtacctggagcatcgtagctacttcgtaagtggtgcgtgacacaaaatggcgattgtttttggcaggcatccttgagaaactgaaggtcgacctaggagtgcttcagaaatccagtgcttggcaactggccaagcagaaggcccaggaagctgagaaattgctgaacaatgtcatttctaagctgcttccaactaacacggacatttttgggtgagttggtccttcagggtggagatctttgctctaaggaaagggaaaacatatctttgaggaggtaagtttaagatgaaagacagatggacaagcctcattcccctcccacagagccaaggtggtctgagcaaggccagacccaccagagcttgagtaaattagaggcagggctacagagtcaatccgggcatcttatgggttcgggcttccgctttctttaatttcagggtcagggtgaaggttatatttatccttacctctacccatttgctggtacacaaagtccctttccaaggaataaaacttcccttttccatatataactgggggtaaaagcccagatccccttaggggaagggaactggagtcttcgccacataaccccaggcagtggatccactcacatacttttattattattattgttattattattattttttgagatggagtttcactcttgttacccaggctggagtgcaatggcacaatcttggctcactacagcctcgcctcctgggttcaagcgattctcctgcctcagcctcctgagtagctgggattagaggcatgcaccaccacgcccggctaattttgtatatttagtagacacagggtttctccatgttggtcaggctggtctcgaactcccgacctcaggagatctgcctgccttggcctcccaaagtgctgggattacaggcgtgagtcaccgtgcccggtcccactcatgaacttttaaagtcagatagttctggcctcaaaatctgcctctggcacttactcccctaggaatctgggggaaaatcacaccagcctgagcctcagtgtgctgtgccataaaatacagagaatcaaacctctgaacagggctatagtgaagactaaagaaggcaaggctgacgagacccaaacgctcagctcgaggctggcccagggaagtggttggcaagtggctgtcatgaggagtgacaagggtgaattgtgggtttcacacaggttgaaaatcagcaactccctcatcctggatgtcaaagctgaaccgatcgatgatggcaaaggccttaacctgagcttccctgtcaccgcgaatgtcactgtggccgggtgagtatgcactagaatctgagatttgggaaaggcagtgcaacctggccgatggatgcccaacctgggaatcgggcacctcctcccgctgctgggtgaacttgggcctcagtttcccaatctgtgagtgagagaacccttctgggtctaagatcttaacccttaaaatgttctagagaactctggccataagcaagtgtcttttaaaaacaatgctccattgaatatagttttgaaatcatgacatttatctggttttaaaatttgaaaagttgagataacaaacatttatcattctttggcaaaatttcctccagcattattttgtccctcaagattctctctaagttgcagtgaccactacagaaaaattcatacaataatacacagtgtataataaagtgtgtgtgtgcaaaatataagtttaaactcttttaagtttagctgggagtggtggcttatacctgtaatcccagcaatttgagaaactgaggtgggaggattgcttgagctcaggagttcgtgaccagccaggacaatatgacaaaaccctgtctctacaaaaaatacaaaaattaaccaggtgtggcagcacacgcctgtagtcccagctacttgggaggctgaggcaagaggattgcttgagccggagaggtcgaggctgcagtgagccgtgattgcaccactgcattccagcctgggcgacagagtgagaccctgtctcacaaaaaataaaaaattttaattttaaaggagatagacaagaaatgagcatgtgtgaaagcacttctgtaaactacatgcactaatgatgccacccattatttagctatgagatcttgggatagttacttaacctctctgtaccaaggtttcctcattcagaaaatagggatagtaataaatgaatccaggtaaaatacttttttaaagtacctacacataaattgttgtcaataaatgttaactattattattttacttattagtgtaatgttgtataaaaaattcatatgagctaaacccaagtggccaggagaagaagcccctaatataaacatgtaaatctcatagaggatatggaccatgttgatattacctgggccatgttgacattacacatagacattctgactcatgtccacacaggtggaggaacccaactgggcaacaggcaggaacttctagactttgttcactgtgcatcttacttcctgcaggcccatcattggccagattatcaacctgaaagcctccttggacctcctgaccgcagtcacaattgaaactgatccccagacacaccagcctgttgccgtcctgggagaatgcgccagtgacccaaccagcatctcactttccttgctggacaagtaagtcccattcatcttagtagagctgggctctcagggaacttgaggacccctaatttcagctctagtcctctacctaagaggaggcctagtggtgaaagtgttcaggctctggagtcatgttgaccttggtttacacatcagctctgccactaacttgtaactttatcaccaacttgacccaggcctgttttcacatctgtaaactgggggtgttcataataactactcataggcttctgagatgaccagatgagaaaatacaaatatttagcacgcagcctggaacatgctgcctctctgcctgctggttctctccattactgagactggagtgttgagctccccaccataatcatggatttgttcatttcgcctttcaactcggtcagtttctgcttcataccctttggagctctgttgttaggtgcatgcacattaggattgttatgacttcttggagaattgtccactttattgttatgtaatgtccctcaataataataataataataacgataaaattatatttaccttcttgcctccagttgggagggagaggggagagtaagtgcctgccacgggctctaatttcagattgtccccaaatcatcctccacccagtggaaatttcctgaaaggagatcttgaaaacttaatcctctccatttgactcactgatcccttttaatccacaaaatctacatcttaagctctgtgcctgaaagagcaggtttgactcaggcaagagggtggaaggagaaagagtgatgctggccgatggctgggagaggatgaatgacccagaagctgagggctggggctacttggccttggccaggagcaaggctgggtcctcagctctcagcccctgtggccatgagcagaggacactccactcgccctgcactgagggatctgaacacaggttgctcaaagacccctgaaaaccaaagaaagtttccatagcctgatgtgagttgcgaaggccggggtgtaaattcagaggctggagcctggctgggtgctatcttcccaagtagcctcagggacgccatcctgctgcactaggtctgtgcccacatctgtgagatggcaccactctgaggctccagatcctcccagggtctttctttgcacttgtggttcaatcccaagtgctccccatggtcatgaaggctctgtttgatctggccccacccttgtatccctgtaccctccccttactcactgtgcccagatacagtggcctttgtgccatgtctcagataggctgtttctcaaggctctttcccagcttaagacctttgcctggggtgctctggctacctagagcaccttcttctcactccactttgatggacttttgcatccttcagggccttcccagggctcctcctattctctctcgtaagagtctaactcttgcctttaaagcactcgtcacaagttctcaatatatatttaattgtatgttcacttctttcattctttcagccaaaaatgtattgaggctgggcacgatggctccacaccggtaatcccagcactttgggaggctgaggtgggtggatcacttgaggtcaggagttcaagaccagcttggccaacatggcaaaatcctgtctctactaaaaatacaaaaattagccgggggtggtggcggtttcctgtaatcccagctactcgggacgctgaggcacaagcattgcttgaacccaggaggcagaggttgcagtgagccgagatcgtgccactgcactccagtctgggtgacagagcaagacattgtctcaaaaaaaaaaaaaaaagtgtattgagcatctgctgtgtgccaggcaggcaccattctgggctctggagaactgattggtgatgacagacaaggtccctgttcttgcggagcttacccaagggaaagctaagctgccgtggatctgtgtccacatctgtgaaatgacaccactctacagctccaaatcctctcagcgcttttctttgcactttggatccaatccaacccaaattcagtccatcggtaaagaacgctccagggaaatgagtcctgcagaaagcattacccttaactgggcactgtgatagcaaagctctctcttaggtaagcagtcagggaggggtgccctgaggaggtggcaattatactaagagttgaaggtgggaggagccaactttggcaagatttgtttaggtaccacatcagggtatgtttggacccttaatgtttaggtaccaggttaggggatgtttgtactttacttattcggtatcctcagggcccagctaggttcctggtgcatagctggtgctctgtaaatacgggttgaatgagtgaacgaataaggtctctgcgctgagaatctcatgaggcactggggtgagccgctggtcagatgtgggagtctaagtgatgatccatgtggatgggaggctctgtctgttaaagtgtctccatgtccctggggtttatctgactccacagtatttcccgcaccgcccccaactttttggcagttctcccatctcttgcccacttgaccagactttaatagttccctgtgttttccagacacagccaaatcatcaacaagttcgtgaatagcgtgatcaacacgctgaaaagcactgtatcctccctgctgcagaaggaggtgagtctcccactccttggagcccagatccaggcctggtgggggcaggtgggggaatttgcaggcctggctgtatcctctgagcacttttccttcggaggtgaaagcttctccttaggaggtcagctggagcttcctcctctactaatcagcctggtgggtagcagggtagagcagaggcctgacattagctgaaattgccaggtcccaaacttgagcctctcaccatatccacgcactaccaatatgcttttgtagctaacatcttcaacacaattttacttaaatatgtttctttagaagcatttatttttaaaaataaaactttatatccctatcataaatagaaaattaatatcacatatcatacaatcaatggacttataaaatagttttaattttttttccatctgtgcatcatccaaaaccataggtaccatgtgcaggattactaggcccaaagttgcagagattctaaatcagtcattctggaagcagacccaggaatgtgggtttataaaagaaaaatcctccggatggctctgtgacccactgaaccggagtttagttatattccaaaagcgatcctccaccagcttcagcctcagctgggtgcttgataggaatgcggaatctcaggccacaccccagacctgctgaattgcaatctgcggggaactgtgtacacacaggagcaagagatactccgctctacaacctcagggcaaatgcctcagggcaccatttgaccctttaaaattccagggttccaaagttcaacatgggaatgttaacaatctagaatgtagatttttgaggtcctagaattctagtgttctaaggtgttaggattctaacaccctagggtttccagatttaagactgctgggatcccattgttctaaaatcctaaggttcaggccaggcgcggtggcttatgcctgtaatcccagctcttttgaaggtcaaggtgggcagatcacttgaggtcaggagttcaagaccagcctggctaacatggtgaaaccctgtctctactgaaaatacaaaaattagccaggcatggtggcatgtgcctgtgaacccagtttcttgagaggctgaggcaggagaatcacttgaatctgggaggcggaggttgcagtgagcagaaatcgtaccactgtactccagcctgggcaagacagtgagattctgtctcagaaaaaaaaaaaaaaatacaataaaacaaaataaaatcctaaggttcaaagattctaagatccctagaaatgagctcatctgtgggtggcaagcaatttgttctcagctgagaagaatgatctgttcttcctcctactcctgaccctcctcttcctcctttctccgctgtcagatatgtccactgatccgcatcttcatccactccctggatgtgaatgtcattcagcaggtcgtcggtaagtcaatggggaagtggggaccttctgaggcaggcatggagctctgtgcccaccccataagcagttctggtcaggggaccctggagaagcagaaggacccactgtcctaagcaaattgggagccatggcttcccctccacaggcacccgggggctccctttggcttttgggtctacaggcatggctggggttgctggggagaaatggagtaagtaaagctgtcaagaccctggaggtgacccttctatgaaaatagccacaagtcagccaggcgcagtggctcacacttgtaatcctagcactttgcgaggctgaggtgggcagaccacttgagttcaggagtttgagaccagcctgggtgacacggtgaaaccccatctctactaaaaaatacaaaattagccaggcgtggtggcatccacctggagtcccagctactcgggaggctgaggcgggaggattgcttgagcctaggaggcggacatcgcaggtagccgacatcatgccactgcactccggcctgggtgacagagtgagaccgcaatctcaaaaaaagaaaaaaaaaaagaagaagaagaaaggaaatagccacaagtccagtcccttaggcagtcactttgtgctctgtacacactatctcactggatccttgcaacaaccctgtggggaaggtactgtcattgtacccactttacagatgaacaaactgaagctcagagaggtggagcaacatccctggggtcccacaactgtcaggttaccggctggagagcggcatcttttggagtctggtctctattcaattccagtggcagagactaaggcctgctattgattttgtttcttcagataatcctcagcacaaaacccagctgcaaaccctcatctgaagaggacgaatgaggaggaccactgtggtgcatgctggtgaggagccagtctctgtgccccaatgcacaggggcctatggtgaagtaaaagtcaagcgtggcttcccttatttttgtgttagaagactgtgccttcatctcagtcatagattgagccctggcccccatcccaggctaggccctgattctggtcacactctgaacactgagccttaatcactgaactctgattctggccccagactgagcctggatcctagtcacagactgagctttgatgccagttattgactgagccttagtcttggtcacagaatgagccccaaccttggtctcaaatggatatccatgattctgatcacatattgggccctgaacctggctccagtagtggcctcaatcaatcttttcacatctaccattgttctgaaggagggtgaggggaatgaagatgagtcagtgccaggtgctaatgaaagaccccaaaccacaggtgccagtttcttcttcccaggacttaaaccgcatggggtattgtgggaaagagctgggacactggagccaggtcaacttgggtcccatcaagtgcccagtggatgactgacagctgggtgtaagggcagcctagcagcaaatgtcctaacccccttggtctcattccagattggttcccagtggcttgccccacccccttatagcatctccctccaggaagctgctgccaccacctaaccagcgtgaaagcctgagtcccaccagaaggaccttcccagataccccttctcctcacagtcagaacagcagcctctacacatgttgtcctgcccctggcaataaaggcccatttctgcacccttctgtgtggcttgttgcattccctccatttgggatttgttggtgggaactggggagggaggttgggggctgcaactagggtgggagagacctggatccagagctagaaggctcagtgggaatatccagccacatctcctggttctataaagggggccactgagacagagagggcaacaaactagcccaagtcacacagccaatctgtggcaatagcagacccctgatctatccattcatgcattcaacaggtatgtagtgaacacctactctgtgccagacaggcaatgggaactggaaagtcacattctggggacagccccacccagcactttcctccattcctctccaggggccctgaggattcttggagaatcaggggacacctagcctgactggagtcaggagtatgagacagagtgatgcagggtcagaggcctgtggccccatctccacctgccctgttagccctgctgccctctaggggtcccactggagcagagatgtcttttccaggtggtgctgagagttctcagtctgtagcaccctcacccacccctcccatcacctgagagcctgtgcacccacttgccaggctgcctggaggcccagcctccctagtgaggtcgagaaccctgggatgctcacctatcctatggagaccagcttctccctccacccaaggcccctccatccacaccccagaatgcagctcggcccatgctgcaccaggctgtggcagagacagcatcacgctgctcacggcaacacgtcatgggggactgcctttgtgcggcccacgggctccattgattccttaccacacccatgcaccaggagagccattatcacacccatttgacagaggaggactctgaggctgatggaggcaaagtgactcctccgggtcacacagtgagcaagaggcagagccaggctttgaatccacagctgtaggacccctgaatttactacaaatgaagacattgaggcacaaagagggcccaggctcagagaggtgacatcctggcttccaggcactttggccgctactcttgccagcctccagcaggctccacttccctggcccaagacagatgaggtactctgggtgctgttcttctcccccaagtgtagaccctcggctcttcctttgctctagaaggggcaggacactgtccgctcccaacaatcgcgttggcctcagcagagatgcaacacgggccacacaccaatgcacaccatcgcctcaggatcccagcagcctctcctttccaatagggaacccagccccaggaacctttgccgattttgccaagcagccatctcattactctgcacaactctaggaggcaggaatgtctcttgtccccacgagaaactcaaactcagagaagccaaggccacactgaagcctgcacccagctgctaattcactcgagggcctcctctctgatgaaggcagcctcactgagtcaggtgacctacagggtcctttgattccttgaagttgcctagagagccttggaccagcaagctgaatcctctcctgagcccctctgctgaagacctcagctctggttatgactgtgagttgcctgacacagggtaaaactgaggacttaggcagatctgagctcgagtcagtccctgccactttctagcagtgtgatcttgggcaagttacttaacctcagttttcttacctgtcaaatggaattaatagtaaaatctccctcactgggcttgtgaggattaaatgaagagtcagtgagtggaaagtgtttaaccagggcctcacatcaagtaagcacagcaggataaatgttggcctctacacactgaaactgctgttatgactgccatactcaggtttgttgattgactgataaaaacactaatatggtagaagaatcgtggcccaaggagatcttgagcttctaccttgtctctctgagggaggactgctaactaactcccactgtgcattcttctctccccaagttttggctagacacacggaccccagccagagaccacatctcccagcctcccttgcagctaactgtggccatgtgactaaggtctggccaatggcaaataagcagaactaattatgcaaattccactttgggctttaaaaggaaggggattccctcaacttcctcctggcattctccctcctctgcagttagaaatgggagcaactagagcaactgccctggacccagaggtggaagctctgtgttgagtacagtacagctactccagcagccccagaccactcagccctgggctcctaagggagaaaggaatgaacttgcttatttaaaccattatgttggggtctttttgctaagtctgctttgtctacattgtacctaactcattctgccaatcacatgctgtgtgaccattaggcagccgacttcctctctcagacccctgtttccatatccctgaaggttcttcctactctgacaggacagaaattaatgtttcttccataaccgaagagggaaggaaagaatagacatttattaagtttctactacatgccagacactgtattagactgatgatgactttgccttccagggaacgtttggtaatgtctggtatgaaccctgaaaatttgagacaggtctcagttaatttagaaagtttattttaccaatgttgaggatgtgtgcccatgacagtctcaggaagtcctgacgacacgtgctgaaggtgatgggggcacagcttggttttacgcattttagggatatatgagacatcaatcgatatatgtaaaaagtacattggttctgtccagaaaaccggggacaactcaaagcaaggaaggggcctccaggtcacaggtaggtgagacaaatggttccattctttcgagtttctgaaaaccctttccaaaggaggcaatcacaatatgcatctatttcagtgagcagagggatgactttgaatagaatgggaggcaggtttgccctgtgcagtttccagctagaattttccttttagcttagtgatttgggggcccaagatattttcctttatttatttatttatttatttatttatttatttattttttatttttttattttttttattgatcattcttgggtgtttctcgcagagggggatttggcagggtcataggacaataatggagggaaggtcagcagataaacaagtgaacaaaggtctctggttttcctaggcagaggaccctgcagccttccgcagtgtttgtgtccctgggtacttgagattagggagtggtgatgactcttaacgagcatgctgccttcaaacatctgtttaacaaagcacatcttgcaccgcccttaatccatttaaccctgagtggacacagcacatgtttcagagagcacagggttggggtaaggtcctagaacaacaggatcccaaggcagaagaatttttcttagtacagaacaaaatgaaaagtctcccatgtctacttctttctacacagacacagcaaccatccgatttctcaatcttttccccacctttcacccttttctattccacaaaaccgccattgtcatcatggccccttctcaatgagctgttgggttcacctcccagacggggtggtggccgggcagaggggctcctcacttcccagtaggggcggccgggcagaggcacccctcacctcccagacggggtggctggccgggcagggggctgaccccccccacctccctcccggacggggcggctggctgggctgggggctgacccccccacctccctcccggacggggcggctggcggggcgggagactgacccgcccacctccctccctgtcggggcggctggctgacccccccacctccctcccggacagggcagctggcctggcggggggctgaccccccacctccctcccggacggggcggctggccgggaggggggctaacccccacctccctcccggacggggtggctgccgggcggagacgctcctcacttcccagacagggtggctgccaggcggagggtctcctcacttctcagatggggcggccgggcagagacgctcctcacctcccagacggggtcgcggccgggcagaggtgctcctcacataccagccggggcggcggggcagaggcgctccccacatctcagacgatgggcggccgggcagagacgctcctcacttcctagatgggatggcggccgggaagaggcgctcctcacttcccagatgggatggcggcggggcagagatgctcctcactttccagactgggcagccaggcagaggggctcctcacatcccagacgatgggtggccaggcagagacgctcctcacttcccagacgcggtggcggctgggcagaggctgcaatctcggcactctggggggccaaggcaggcggctgggaggtggaggttgtagcgagccgagatcacgccactgcactccagcctgggcaccattgagcactgagtgaacgagagtccgtctgcaatcccggcacctcgggaggccgaggctggcggatcactcgcggttaggagctggagaccagcccggccaacacagcgaaaccccgtctccaccaaaaaaatacgaaaaccagtcaggcgtggcggcgcgtgcctgcgattgcaggcactctgcaggctgaggcaggagaatcaggcagggaggttgcagtgagccgagatggcagcagcacagtccagcttcggctgggcatcagagggagaccgtggaaagagagggagagggagaccgtggggagagggagagggggagggggagggggaggggaagatttttctcttcattttctgcccatccgaaagctttcatcgatattttcctttcacactggcaatatttttggttgtcacaaatggatgaggtgtgtgctactccaggagagcacatgagtagaggccaggggtggtgctacccattccataatacacagaacagcccctcacaacagaagcatctaacctaaaatgtcactagtgttaagaaaccctaggccgggcacggtggctcacgcctgtaatcccagcactttgggaggtcaaggcaggtggatcacgaggtcaggagatcgagaccatcctggctaacgtggtgaaaccccgtatctactaaaaatacaaaaaaaaattagccgggcatagtggcgggcccctgtagtcccagctactcgggaggctgaggcaagagaatggcatgaacccgggaggcagagcttgcagagcggagatcacgccactgcactccagcctgggtgacagagtgagactccatctcaaaaaaaaaaaaaaaaaatgacaggacccactcaccccacccacccctctaagccaccagggaaggcaaaactaggtcatgaaaagtgctgaaagaggcaaggttttagacttagttagcttcacttccaggaatctgtccaaaaaacttaagtacagatacatttaagcacaaagacataggggtattcatgatgggaatttaaaaaacaaaaaacctgaaacaaaaagcaaataattaaacccaagtacaagattagcaatgctgacaacatttgtaatggtgagagagtgagactctgtcttaaaaaaaagaaaaaagaaaccctgtagtaggcaactggtattgactgaggacagtgagggccaggaccccggggcgcagcctcaggattccccacgcttgcagctggggagcctggggtaggcaatttgtgggtgaccatgtctgcgaaggactttgccatctgtgttttcggacctggggagaaagaaccccatcccctacccctcctccaccattttagataccccagatggactcattttggggttcccactgacatccaggaaggacacaaacccttctctgaccccagccagctctagtggccacctctctttgccacggtgaccctgctcccatgaccctgcggtgtctggagccctccaggaatggcagggaagggacgcggagccagcagggagaccacagggtcactgaggagctgtgcctgaagacggtgcgtgtctggcaaggccctgcaggagctcccacaggatggtacgggggaaatatgtccacagagccaaagagaaattaaaagaggcaccaggaggaaattccttgattagagatagctcccattcagacgacctactaacaatatctgttaaaacatcagctggaccaactaatcttccaatcaaataccaagatggtaaattcagattgcactctgtcctatgtggcaagtatggtttcatctgattgactgctatgttcagatgtgtaaggatgagcagacgggtgggaaggccccagaacagcactgctcacctttactgaccaaatcactctacccatcagcactgatgaaacaggaaaatagagtctggagacagggaacataaggccaattcacacttcagctatgacaggaaatgtcctctccatagggcctacactgagtaaatgactttgtaactttacttcatcctgttcatttacacagggcgtaccccaagtacagggtatttaaactcacaaaaactctgtaacagggcctttgagcccgtgttcggccctgctcccacactgtggagtgcacttccttttcaataaatctcttcattcctttcttgctttgtttgtgcgttttgtccaattctttgttcaagacaccaagaacctggacactgtccaccggaaacaccatctctatagcagctctgtgaacccactgctaacagacagtgatatctgggaacggcctttaccaacaagactaaaagttaattggaagaatatcagttccaggtataagtgggtttttttttgtttgttttctttgtttgtttgtttgtttttgagactagagtcttgctctgttgcccagactggagtgcagtgatgtgatctcagctcactgcaaccttcacctcccaggttcaagcaattctcctgcctcagcctcccaagtaggtgggattagaggcacccaccatgcctggctaattttttgtatttttagtacagacagggtttcgccatgttggccagactggtctcgaactcctgacctcaagtgatgcaaccgcctaggcctcccaaaatgctgggattacaggcctgagccaccatgcccggccgtgtttctcttttcctaaacatgcctcacatagcgtatctccaaatgcagctatgtaaaagggaaccaaaacttgagtgactgctctgaatagctatgcggaattctttgtaagaactgctaaagtcagtctgatttaaatgcgcgaagaggcagctaggtatttaaagttcccccagatattttcacctaagtgatacctcccttcctaaggctgaccaaggccagttgatccttttaaattaaaaataaaatgtcccatgcaaaggctggaggagtgttttatcagaatgccttgcctttctgaggttcctttctattaggtcgaaggtctatgctccaggaggagagaaagacctcctcataggaatgctaaagggatggcaggaactgagctgatcccaggcttcactgcaattttgtatgcctgttcgtcagtctcttttagggcattctatattttgcattctgatgtacctaggagttaaacagttgttaaacagatcgtgcttgtgagtatttctctctcattttctacaattaaccaaataaacaacaaaaaaaagcccatgaagccctgtatttgtctttttttttttttttttttttgagatggagtcttgctctgtcaccagactggagtgcaggggcgcgatctcggctcactgcaacctctgcctcccaggttcaagtgattctcctgcctcagcctcccgagtagctgggattacaggcacacgccaccacaccccgctaatttttgtatttttagtagagatggggtttcaccatgttgtccaggatggcctcaatctcatgacctcgtgatccacctgccttgacctcccaaagtgctgggattacaggtgtaagccaccgcacttggcctgtatttgtctttttactacatggatgaactctgtcatatgaataagtactgtactaatccattttaagggaggcttatttcagaaatatttcaaactggtgcaaatggaaaaggctttttttcttttaaagctaaagacaagaatgtcatgctatacaggtagaatttgacctctgctaataaaaaccaatgtagatatagacattttgccatttgaagtagctgtgtcccaacatgttgccattgattttttggaaatggctttagaaatgtccaagttgggctggacacagtggctcattcctgtaatcccagcactttgggaggccaaagcggacggatcacttgaagccaggagttcgagaccagcctggccaacatggtgaaaccccatctctactaaaaatacaaaaactagccgggcgtggtggcacatgcctttaatcccagctacttgggaggctgaggcaggaggatcacttgaacctgggaggcagaggttgcagtgagctgagatcacgccactgcactccagcctgggtgagagtgagactgtgcctcaggaagaaaaaagaaaaaaaaagaaatctccaagatgtccttgaattgtctaaccatggacattgtcagttctcccttctatcatgtagaatacttagacttaatattcttccagatacagggggatacttgcttgtttttcaaagtgtttatttactgctgctactatttgattacaatgtgttaaattttaaaacctgtgggagtggcgaggtggggaagaaatcctgtagtggacctcatacacatttatctcattgaattcggattttttctgagtgatccagtgaatgagtctttggataggggtggcaactcacggtcagagtggtgaagtgacttgtctgaggccacatggctggtcagaggcaaaattgcatttaatccgaagttcatctcctccatagctttccccccgctagccaaagatgaaggatgtgaattttccttgctgattataatttgtggcaatcccacctcccacagaaaatacacaaggaggtgctcgaaatttggggcttcttttgggcagtaactaactcgggtcggtgccaagccttagtccatgctgtaccaaccacctaggacaccttttcttctcccttatctgctggttaaatcctcctcaaccttccagactcactgctcaggagtcaccgcccagctaagtggggactgctccttaatgtttccaaaaatgagacactgtatttctcgactggcaggtctaaccaagctaccttgtcaccagcgtccagtgcagagagaacactcaaaaatcatcagctttcaatagcgtggcttccacttttctcattcacccctccgcccatctgccccagggcaggtgcttcagtcttcaacagctctagtgcctagcaaaggtgcaagcaaataacccatgatgaatgaatgactggatgagtgaataaatgaatgaacctcttcttgactgtacatggacaccatctctggggcagctgaatgggtgagtaagcaggaaaattctagcaaaccaggattagggggtataggagacctgcattattttctgttaaccagagacagataatggaggacaaaattgatggactatgaaccaaatgcatggctcctaggtacatgactccaggctgtggagggggtagggccaagatcaccaggacccactgaagactgatgtggccaatgtggggttggggggggggttcccctctgtgagcctccctgggaccagctctgacttctttttcaccaagcccagaatgtaaaagtggggatgtggtgagggcttcctggaggtggtgatgtcccatgaaggaggctttgggtaagaggaggatgctttgggagggagagggacacctaccataaggggatatgtgggaagaatgaaggcaaaacctaagtggacatgaggttatccagagagtaaagcactcaactctagtacaggctcttttgaagcctttattcagttaaatcaatgctgtccattaatatggatctttccaatgtttgcctgatttacacaggataacatttcaggatccaaattgttaactctatgccttggaacattttgtgaccccaggaacacatcacgaaatatttaccaaactggatctttctgtttacattacaatgatagcgtgtacatatttcactacatctttgccagcagatggaaacctttattgtaaatatttgctctgtgaatgggaatagaataaatttcataacactggaaaagccaaagttctcaaattaggggagttaattgttacaccaactcgacagactgctttctgagcatttttaaaaatggaaaaatagctgtagtttccagctgggtgggaatacagatctaagaatttgcttagctggaatcacaatgatgcaaaaaagtggaactgagaaaaaactgaaaagggatgccaaaatttgacagaagtttatttgttagacatgactcttatttctgtgttagtgcatgcaagaaaaaaaaatgcattttcaaaaaaaaaataggaagattgttgagtatctagctgagccaagcctgtgctgagcaattcagaggtgacctaagcagtgcctctccaacctcagcatgcaaggaatatgttcctgctacacctgctgcaggggctggaggaactgagaggggaaaagggctagacttgttctcaccatcaagaaagtacagcctgttcctgctgcaataacaaaatatcttagactgagtaatttataaataatagaaatttacgtctcacacttctggaggctggaagtccaagatcaaagtgccagcagacttggtgtctggtaaaggctttctctctgcttccaagatgacaccttctcactgcaatcacaagagagaaaggatggaagggcaaacagggacaactgctgtgtcctcatatggcagaagagaagtggaagggccaggcagctatctgaggccatctttataaggacactgtcctattcatgagtacagaactcttatgacttaattgggcccaacaggccccacctcttaataccactactttggggtttaagttccaacatatgaattttggagggacacatgcattcaaaccatgcacgtgttttaagacatctttgcaattaaggctttagtggggtcccaacttttcaaatggttgagcacatctgttctgaagtcttcaaggaacaaacatcttcagtgagatagagaacagttgcccctaccctacaaggaaaccacagctctgctttaaaaggaggaaattgtgatgtagtgtgaaggttacaagctttcatagaatgtagaactagattcaaatcctgattctattatacactagctctaggaccttgggcaagatttgtcttctcttgagtcttagtttcctcatctgtaaaatcaggcaaattagttcttagatgataaggatgcatttgtgaaaattgcctgtcaatgtgagctactattattatagatggagagacggagaccatgaaagggcttgggagctgtccagcatcaaacagcaagaaatgggcagcgccatgctagaattcaagggtctgggaccacaaaccagtaaactgaagctaggacaccctctgcctccccactcacagaagaccgagtggcttccttcctcggagtcaccaggcccatctcgcttattgtacagatgagaaaagcatctcagagtggagcagggatgtgaatgtgactcctgcacaccatcttcccacttgcagcccctctcggtgctctccacactctctgcacctctccatttgatggcattcatgatgtacagattcaaatatgttgttgacattcccccgggccttccaagcaggaatgtttgctttggaggtattggatagacgtggtaaaatcaagggctttccatcagcttcctagctgtccatcacccagtgccacgtctcccccagcaatgggatcacttgccatttatacagtctgcccccctacaaagtcatcgggaatcaacctacagaggccagagtgtcttgacagcacaccagagaaatccaggtaagcacaaggcaatggcactctccaacctgcctcttcatcagatgctgaaccagactaaagcttttgatacatgttaccagttattaccaattgtgtttggttctagcacagaacatgaaaaatcgtggcttcaatcatgatgagaagcccagagttaggctggcagagcctgccatctccttccttggctacccctaggatgtggctttcatcttcctgctagtaagataactgctgggctccagtcgtcatatcttatatgtaatcaggaaaaagcaggagaggaaaacaaaagcatgcaatttgcagctgggtcagccactctagagaagtttttaagaagccccgacctacaatttccatttatatctcattgatcatgcctggttgcaaagaaggttgggaaagataatttctttgttaagcacatttcttccctcaaaaataaaaggattctgtaaataaagagggaagaatgggcatgtgccctcggctctccaagcttccgtttcctgctctgtaaaggaagcatgtcaataactgtctcataagattgggatgttgtaaggaattgggggactcctccaacacccagcaggaaagatgctccctggccaccctcccctccttcagactgtctgtgagtcttccaagggtactcactgtcagaaccagggagggataaaaaggaactttaattgcaaatccaaaattaacttctatttagtggcactaggctaaacaattttcaaaatgcttcctgaattctcctagtaacctttttgagtgagatgcagattaaagtataaaaaactaaaagacgggagagccaggtgctagccactaactacagctggccttaggaaaacttaaccctgatccgagcctcagtgtgccatctgtaaaatgggtattgggccaggtgcggtggcttatgcctgtaatcccagcactttgggaggcggaggtgggaggatcacgaggtcaggagtttgagatcagcctggccaatatggtgaaacctgtctctactaaaaacacaaaaagtagctgggcatgatggagcacacctgtagtcccagctactcgggaggttgaggcaggagaatcgcttgaacccaggaggcagaggttgcagtgaaccgagatcgtgccactgactccagcctgggtgacagagcaagactccatctcaaaaaaaaaaaatgggtgttgggtgggtaagaatgagtccaaatgactcctttgcttcccccctatctcctttagctccatagagaacctctcagagtgaccctgaagctgactgtacttacctggtatcccacgggtactgccccaagatgctgaaggtctcgggcctccttatcctctgttggtttcttgccctgttgtctgctcaatatttgaatatttgacttgcctgtgggtttattatatcatatattttaatttcttggcctttagtcccttggtcattttttaagcatgcatgccttgtaaatttttattggatgctgaacatggtggtgaaatgacattatcttttttccagaaacgaagatggcagaaagatagagcagaaatggatcatgaccctgcctaggcttagctttgtgttttattaagtagaactattttggtcttgttcttacttttagagggagactatttctagggtgtggccctttctcctagagcacagtgctttatgtcttcactgagagcttaagatgtgtaccaaggttcctcccatcaaaggggccccacctcaaactagcgcttccttccccagcatcacacagtggatgtgctgatgtctctgttcagctttttaactttcacctgctattttctgccacatggctgagagtcccacactgctagggtgcagcttaaaaagctgagatttcaaggctccttccctggggaacttcctctttgggatttttgcccctcaagtcccagccactctggtagccccaaattccaacttctgtcccctcatccctgtaagactagctctttttgcttggaccctggttgacatgttggaaaatgacctcaggcaaaagctgggtgaatatggagcccgccttgaatgatgcctctttctcaagaatcacggggtttcaaattgtgcccatgtagttgctcatggatgtcctcctttgtttttacagatttccatctcttatagttgactttaattgggagtgttagtctgatgcaagatactctgtcatgatcaaaaccagaactctgcagatggaacttgaacttagatttcatagggactgtgcaacccctcatttggggttcagggatagggtgagaaggatgaacacagagaatgcttcgatacttataaaaacaggctgggcgcggtggctcacgcctgtaatcccagtactttgggaggctgacgcgggcagattacctgagcttaggagttcacgaccagcctgggcaacacggtgaaaccccgtctctactaaaattaaaaaaaaaaaattagtcgggtgtggtggcttgcgcagaggttgcagtgagctgagattgcgccactgcactccagccttggtgacagagcgaaactccatctcaaaaacaaaacaaaacaagacaccacacacacacacataaacacacaaacaaacaaacacacaaaacaaacaaacaaataaaacacacacacaaacaaacaaaaagaacttcagggttggttattcctagaaaatgcttcgtgggttataatgtggcaggtaaatgcagaaaaacacctaaggatattcctgccggtgccatctggggtaaaaacatgaaaatagcccaaaagaggagacattccatgaacatcagtcaatacataccttagaaaattctgcagacaaggaggtagacagtcctgatgtactgctacttgaataaatgcttctgtagaagcatgacaggccaatccttgtttctcatcatgttacatgaatgcacgcctatggaaagaaaaacttccaaaaaaagatacaacagaagttatctctgtgaactgatttttatttacttttttctctttgtgcatatcttcactttctaatttttctacttgcctaaaaacagatcacccaaattaaaatgttaagccaggccagttgcggtggctcacgcctgtaatcctagcactttgggaggccaagtcggatggatcacctgaggtcaggagttcgaaaccagcctggccaacatggtgaaaccccgtctctaccaaaaatatgaaaaaattagctgagcgtggtggtggatgcctgtgatcccagctacttgggaggcgaggcaggagaattgcttgataccaagaggcggaggttgcagtgagccgagatcacaccacaccgcactccagcctgggaaacagagtgaaactctgtctcaaaataaataaataaataaataaaataaaataaaatgctaaaccaaatgggttatgaatttacatgagaatagtgaccagggactgggctgagagtctgcttggaatctgtcaagtgtcgaaggagagaatcggtccctaccagcctttacctgttagtctcaggtcctaatgggaccatttgcactggcatttggttgaagtcccaggaagccacacgaacatcttcatgcacctcctttccaggaggtgtggagggtgtgtcaagatcccgagggccactcctagcccagggagtgtgccattcaagcgggcacagtaaatggtcctacagtgtccacatactccagccctggtccctcagcctgggcccttcttgtctgtgctgtggagcctactctctcccatcagctcagggaggtaagcccttgaaaatgtcaagtgaaaatcatgatcataatgatgcattagtacagtggtgaccatttgtgaagcacttacaatgtgcaaggtactgtgctaagtgcttacgacaagagcaagaggaaggtatgagtttggatcctctgcatcttccagatgaggaaagcctaaggtatccagcaagtaggtggcagagctgggattccatcccaggtctgtctgtctctgaagccagggcatatcaccaccaccattttgctgtaaaatgaggatagtgtgtcctgcataacatcgtgtggtgaagcaacttgcactaaatcccacaatcccacagctgctaacaggtgggggtcttcagagaccattgtcataactctaacattatgcagcctctcgcagcagccatgagcagccctgctggggaaggcagtgtccctgcgggaaaaaccgtatgtccagcttttgggcataaatacaggttgtgtggccttgggcaagtgacttcatctcttggaccctccctttcttgctctaaactatgaggaaaagcaggtccctccctgagcctcagtagacccatctgtaaaatggacataggtgaatgggtccatatgagttctgtggccacttcagatctgagctctgggaagaccctctgagaaagtgtccttgcaaatgacctctttgccctgatcctccacagggacctgaccgaagatgctgaatgtctccggcctctttgttctcctctgtgggctgcttgtctcatcctctgcacaggaggtcctggctggagtttcttcccagctccttaatggtgagactgtcctgctttgggtcatgcagaaccctgagccaatgccagttaagttctcattagcaaagtacctgggacacaatgaacactattaattattagccgtcctgactgcaacatcgtttaatcctcattttccgagcaccccctctttcctgtctccttgctgtgctttatctatcaagacccaccatcaaaggaaccagctctatatggactggtccctgtcgcagcctttgtacctgctgtttcctctgcctgggacactcttcccctacctgtcaacctagctgcctcccttccttcaggtctctgctcaaatgccacatttgcagaaagcccttccttgacctcctgcgtaaatgaatccctcaccctgccttttgttttttcatcataggatggactgatatctagcggcatggtcatcgtggttaaaacattgaaattttggggtatactatttgtgaagtatttcctgcttagagactctccaggtgcccgccattgccccaaccatcccagcttcacccccagaactctagcttccccatgaacgaaacaactatggagttaacacctggcacagcccggggagcccaggacctggatccagagctatgaccagtgcccctgttgagctcattgctaaatactttgaaaccaaccccttcacagcacttgtttgcaccggaatcctgcctgtccctttattctccactttttcgtctgtctctcctcagtcctgtaagaatgccagctccatcagggtggtgcccagggtggtgaacagactgggtgcatggcctgggtgcatagtaggcccctgtgaatatttgctggatgattatgtctagaacttggcccacagtccagcaagccagaaatagctgaacaacaagtcagagccacataggggacatgctcggaggtcaaggttgtatctgaggatctttggcatctaaatgtctacttgggtttgggagtggggcattctttacagatttgactcaaggactcctcagggcagactttcttcccagcctgcagacaactggcctccagaaaccattgagtagtgccttcgatggtgtatcaggcctcctggacatctttggacctccactcaccaatgagatcaacactgttaggtgagtggtctctgatcaccaaccacccccagtccaggctgtcctggtttgttggattgttagagctctccccacatttcctgacctcacagaggcccttcccttgcaaagagcctttccaactctgatggcctgagatcccctggttgggagaaactcccaccgcgggaggctaggggagaggctaaagacacaggggttcagtccccttgtctgggaagaggatggctgctcaccagctgtaacagcatcacccatctccccctttctctaagcctcaacatctgccctgttcaatggggaataatagcttctaaccccatagggctgttgtgaacattaagtgaaataatatgtgtaaaatgtttgcacatcctcctctcctcagtgagcatccaatcacaggtaataaacaacaacaggaagaatgtggtaatcctaacactagatgatgctgagctttagggttagactggccatcagaatatagaagacctgggtcccttgcctcacaagcatcttaaactcaacatgtccaaaactcaactgctgactcataccttcatccctgccacaacctgtgcctccccctgcccagcccatcttacctaatgacaactccatccatccagttgctctggccaaaaatcatgatgtcctccctggctcctctgtctcctttgtacctgcttccagcctgttgccaaaccctccctgtcacttctgcctttaaatcatacccaggcatctcaccactttttttttccacctctggtggtctgagccaccattatctccccgcttgacttacagccccagattattctgcttccacccaccagccctcatctcctccattctgttctgccagtatccagaaaaatctttctaagaagtggagctgaccctgtaactcccttgtccaaaccctccgatgtgttctcttcgccctcagaaccaagcccaaagttcttaccactggccctcaaggctccacacaatctggccctggctacctcgctcacctcttctactagtctcgcatcactctctgcctgctagccacatgaagcctgttgctgttcctcaaacacaccagccacatttcagcctcagggattttgcacttgctctgtcttctttatttttactattattattgttttgagatggggtcttgctccatctcccgggctggagttcagtgagtggtgtgaccacagctcactgcagcctcaacctcctgggctcaagccatcctcctgcctcagcctcccaagtagctggaaccacagacacatgccaccatgcccagctaattttttgtttggttgcttgattttttgttttgctttgttttgttttcgagacaaggtcttgctctgtcacccaggctggagtgcagtggcacaatcacggctcactgcagccttgacttctaggcttaattgatcctcctgccttggcctcccaaagtgctgggattacaggtgtgagccactgcacccagccttgctctgtcttaaacctgtcctttccttctcctggctatctgcatgactcattctcacttcattcgtgactctgcccaaacatcacctcctatgataaaccttccctgactaccctgtctgaaattccactcttcccaatattaccttccatcttcctgatcctgtagggccttttttttcacggtgcctatcactttctatatgtatttatttactggatttattctcctatacatatatacctgctccaagcatctgctatatatggctttcagttttattcactcgttgatttcagcctgcttggtgctgggcaaagtgctgaacgtgattattctgagatacagcaaggtaagagcttctttttgctcagggatatattccccgtgcttataacacatagtaactttgcaataaactacctggttaatgaatgagtactgatctttgcatatattcagcttcttctctgcaagggacctgccattgcacaaagtgaggtccacctgcagcaggagccacagcctccctgtgttgtgttgtttcttcacccagcatacaggtgaaaaatcctcaactcctccatgtctccatcgagagcacccctcaaagaaaggaggccactgtacaagtaccattcacgtctgagttgattgtgcagtaagtcacagctatgggtcttgcagtctccattggcttttgcataggagtcgggggatgtgggcagatccctaaccaaagggctcagcgacggactcactgtgtggttagagcaaaacatccaccctctctgggcctgagtcgccccatgtgtagaatgagaggcctgcagaacacttgagtgctccaagcttggggcctctctggggaaagcagatttcctcgcccgacctcatccagacagcccccaccttcatttatttggactttatgagttctcttagttctgattgaatgtaactgaagacaagagcaaagaatcacctctggaccccaattccgtggcactattgcctagagatcaccccaggggctgcatctgacccactgatatattttgtctggtttgcatggtgcatctgcagaggccacgcattctccagttcaccacagcctttaccgctccctgtgaaactaattgcccatctgcttcattcatttccatttcaagcctggccatcaaggcaatggagtttgagactctagaaaaggactttccaaggtcagatgcagtttctcagttttgataagatgtcatacttagaatcaacattttccttcctaactgtccccagagccagaggtagcaagtattagttagactccctgagtgcagaaccctctgacttagccactggctggatgcatgacttggagaaagccattcccattctccaggactgaatggcctcttttgaaaaatgagaaaatgaccttaacagggtggttttgaagaaccctagttctagaaacaaatgaggatgtagtaagctctgagcttctccccgacctgccttacctcttccctcctacaggctcctgaccatgaagcccttcacagctaatatgcagtcagatataaaagtccagattcgtttggagaagaatgtaggtggcagatatgagcttgcctttgggaactgcaggctcttgcccgaggctatttggatccaaactggagtccagtgagttctcaatctgtctttctctgtgtccagctggttatgatgacgtccccagtgagatttcacctgaaagatgtcaccagaaaaacaataccctaccaaattaggcttttgtgtgtatagtgatgtgtgtataataaataggactttctgtgtctttaaaattttgctttttacaaaagtaataattctatcgacatgaaaagagacttaccaaatagtactaagcaaaaaaaaaaaaaaaaagaaggattgcttggccatttgttgatagattatttctaaacttttgggctaaccaggtggctcatctgtaatctcagtactttgggaggtcgaggcaggtggatagcttgagcccaggagttcaagaccagcctgggcaacatggcaaaaccctgtctatacaaaaaatacaaaaattagccaggtgttgtggcaggcacctatagtctcagctactagggaggctgaggtaggaggatcacttgagcccaagaggttgaggctgcggtgagccataagcatgccactgcactccagccggggcaacaagcaagaccctgtctcaaaaaaattaaattaattcaaaagataaacatttgctaacataaataacccagaacattttgatacaggaaacttttccaaaataaaattacgttcttattgtagatttttaagattattccaaacgtatacacagttctacaacttctaagttttaaggcactgccaaaccactcaacaaatgccttaccaatggaactgaagcaagtggcatgtctgtagccgacattcggcagttttgtcccatatacaatcaatcccaattattctctttttcacaacatttattcttttatacatacataccttccccaagtatctctatagatggctctcagtcttactcattcatttatttcagcctgcttggtgctgggaaaagtgctgaatatgattattctgaggtatgttaagacaagatcttcttttcactaggaggaaaatcccacgaatgctattgttttcattaccttgtctaccagtagaaaagaatttcatcatttcttagtctctgatatttcctcttcagagaaactgtcttcagaggttttgcccttttattaattagagttttagtgtttacttctaaatttataatttctttttaaaaatcttctttgtaaatattttttttgaaacgagatttcactcagttgcccaagctgaagtgcaatggtcgtgcaatctcggctcactgcaagctccacctccccaactcaggcaatgctcccatctaggcctcctgaatacctgagattacaagcacaggccaccatgcctggctaatttttgtgttttttgtagagacagagtttcaccatgtctcccaggctggtctcaaactcctgcacccaactgatctacctgcctcagtctcttaaagtgctgggattacaggcatgagccaccacacctagcccttttaaaaaatttttttttaattaaggctgatatccacatttagctgaatccagtggtcatcaccagtccattttctatcctgtcttcttcttattttgattcatctcagttgctcactctttcaggaaagatctgggtgtggaatgctttctgcacccttgcacacctggtcctgtcctcctgacatgctcaaacataagtgagaaccagaccagattcacagcccatctccccttctgaaaactctgcaaatacctctctctcccatgatatactaaagaaaatgtccctcttttgcaaggaatttgagacctcaggttggaagcagtagatcgtagctgatttctatgcaaactctttaagaaataaagacataaaccctttgcctgagaataaaacagatttaccctcacatgttaaggattagggactgagtcaggaacacagaacacaaggacacctttatgctatttcctgcttctttctcctttctcccaattaaagaacgatgttacactgttccttccatgaaagcattggccctctggcagaggagataagttctactgtagcatcaggtaatcagagaaatgggaaagtgagaaggaaggagagaactgagaattggctaggatggtcaagaagagctttctggaggaaaccagttggccgggcctagcaaagtgatagaatttgaagaaggcatctccagagggagatgcaaaatagtcacagaaaacataatggtgagtaacaatgataagggcaaggtgatttaaattggaagattaattttaaagaaccctagagtgtggattggagcggtaggacacagctgggtgatggaatgccatggaaacaaggagtagacttgaagaagttcacgggcattgagcaaagaagtgatagggataaaggagagtctgagagaagttaatctgttctgcatattttctgcctcttcatttagactcgccccagcgcaaaatttgttgtggcaaacatagagagaaacctgaaaaacatagtagcccatgatctgggacgaaaagtaagtatgcaaacccagattacttccatttttgagctgagactcaaagcatgggggagtttggatcttcttaatgaagtgggaagaaatcttccaggaaggaaagttagagagagatggagtggcatctgttaagtttccattctgcaatcaggcactggtgaagtattttacagacattatttaattatttaggtcaaagtcagcatccatatgaccagaagtaagtagataaatctccccaaaactcagtttccttatctgtaagatggagataagtaatcacaaaattaacattcactaagcacgcaaacactgtgctaagtatctgaaatgaattttcttatctcatcctccaaacaatctcatactccaggtaacaatatcatcttcattttccagatttaagttccagagaaggccaatgacttactcaagtcatagagctaccaagtggccgagctggcttatgaccctagggcagtctgcccccaaaacccatctacttggttgtccccagaatgggttggcttgggagaacttgccttgctcactcccatttagactttattagtggagccctcctcttgacttttgcctatttccttgtctttcaggtgtgccctgtgattaataaatggctctacaacctggaccagcatgtggttaaagagttgattagtaagtgctggaggtgggaagggacaggaacactccagaagaaagctcagaaccctccctcaccctttgtatttcatttccccttacctcactctggcacttctcctagaccaaaaatctctttcctgctgaagtagaatggtccctaataataacaaccttaataataaactcagctgacattaactgagggagcccagtgtgccaacatgaagcactgtgcctgcactagcaattgaacgtgcacctttagctaaggacgtgctggtttcaattctattcttgctcccaaagcctagagcagctgagatatgaatggaaacttctccaggggagaaaatctgcccaattctgcctttgtcctcccctaaatttgtatgagttaaatgatgggcagaaaattggtctgttttcagcccagacaaacactgcctcctttcagtagtcgctacctcaagcatccaaagttttcatatctgccagaactcaaagcaaaaaatgcaagattgaatctcagcagctcaggcccccagcaggacttcaaacttccaccaccaaaaaaaaaaaaaaaaaaaatgctgaattgaaaggtatatgccttcattcactgaatattcactcgtcctgccaagtgccagatgccagagtttctaaaattcctcgagtggctctcccagcaagcaattttctgacttctgcctattccattgactgggaagtcactacttttttttttttttttttttgagatggaatctcactctattgcccagactggagtgcagtggtgcgatctcggctccctgcaacctctgcctccagagttcaagcgattctcctgcctcagcctcccaagtagctgggattacaggcaggcatcaccatccctggctaatttttgtatttttagtagagatggggtttcattgtgttagccaggctggtcttgaactcctaacttcaagtgatccacccgcctcagcctcctaaagtgctgggattacaggtgtgaaccaccaccagtgagcccggccagtactcactacttatgaggtaggaagcttgaggcaactaatctggatgagcctaaaaactcccaaagcttgtgttcccgggcccactcaaatgaatgggacagctcaaccaacaccttcgctctactatgggccatcacttcagagagatggccaggtgaatggagactccggctgcagcaatggcacctttctccactgtctcattccaatgtaggagctcttaagtgattagcttgggaagaagtggttgttcccaatctgtagataaggaaaccaagatccaagaactttaagcaatttatccaggattacttagtaaaaaataataacaataaaagctaaatgcatattaagtgctttactatgtgccaggctctttgcagactttatatatgttaatttgatctgtccatacaactccgtgaactaggtattatcactatcttcattttaaagatgaggaaacagaaacaaaggaagatcaaaatgtttgcccatatttccatggaagaaaatgtcagagccagagtgaacccgcatcctccagctacagagcccacactggtagtcactgtactgcatggataaagaactgtcagttaaatcatacaagacagccagtgacaaataagagcttccagcctcagccttctgtctccacaccttgggctcatttctcatccccattctgctcccagtgctgctccaagggggaaacttccctggcctctctgatcctccaccacccccacagtctgagtatctcttttgcattctagatctggtcctgctgcaggaaaagtaccaagtcaccatctaaatgtccccaaagtgaagaagctatgtgtgtatcaatccggtgagaaaccagagcatgtttccattgcttagtgatgacctttggcctttagggtcattataagtgtgttattcattcatttgttaaattttagttaagcccctactatatgctagactctattccacatgttaggaatacagcagtgaacaagatggacaaggaatctgatttcctggagcttgtattctagttgggaatactaacagtgaataaggaaataaatatatagtcaactaaattccagaggatggtgggtattcagaagaaaacaaagtaggaggatgtgggcaaaagtaactggggtgggggcagagagagagacatcaaattaatacagtcagacagaggctctttggggaacaaagggacaattcagctgagccctgaatgataaggcagaaggagttgtgccaagacccaggagaaaagtatcacaagcaagaggatgaacatgtgcaaagtccctgaggcagaaatgaatgaacttgcctttttgaagtaaagaaaggaggccgtcgtgggctggagtgtgtagggagctcagttgtaggagacatctttacaagagtgatatttggcagagaaaaggaagggagtttctataaaaggagatatcattattcattcatttatcatgtatgtatttgcaactcttcagtgctgaatacactctgctcaggtgtcaccatctcaagtctctcaaaaatggcacatccaccactctcttccctgctttacttttcttcataccactcattattatttgacttcctactatattatatgtatcttttctctccacctcttaaaagaatgtagacctcatgaagtcagggactttatctattccctgttttatcccaagttccaggattacaaaaatgaatcacacttggcccctgacctcaagagctcccagcctagcgagagataaaacaaataaatcggcaatttcatgtgcattgaggtgctcagttaaggttctatggaagtagagaggcaagacccagtagccaggggacttccaggagactttgcagaaaaggcaagatttaaactgggtattgaaaaatgataaagactcactttgtgggaaaagacattataagcagaggatacagcatgtgcaagtacacagaagcaggaaagggtctgatgctttgggcaatggggagaagctctgggcaatggggagaagctctgggtgactgcccataggagtcatgggggacagaggtatcctcccctgaggagtaaggataagcatgtaataagctatgctgtacacatgctttgtgagaacaaggtcacatgtgatgaattgggctgtaagaaggtacagtccatgacaggggacataaaaaattaagtgcccaacaccataatggaatccacatccttgagttaattagcttagttacgtaatactctaaaccaatgttatccaatagaaatataacaggagacacacaagtaattttgaattttctggcaaggccatctttaaaaggaaaaagaaacagattatattaaccttactagtttatatttacccaccatatccaaaatattatcattttaacatggaatcaatataaaagtaataaaatattttacattctatttttgcagtaagtctttggtctgatgtgtattttatacttacagcacatttcaatgtggactagctgcatttcaaatgctgatatccatgtgtgactagtggctaccatattggacaacgcagctctctctaagtaaattggctggcagttgcaaaacgttgaaaggtctagggcatctcatgtattcctgccaatatatctaggctgccacttagcacagaagtcccaaatctgtgacacccccccccccatattatattcagctcacagacatgtttggtttagcctataaagtgttttatacatgtgactgagttgccaatattaaaagtaagaaatatgtcttttgattagctagggcacctggtgatattttgtattattgtgttgtgaagtaggccaaggcgacgaggaagagccaccttaattgatgagaggaagtccagggaaacaatgagaaaacgttatccagagagaggcagtggatgggtgtcccgacaggaatagatttcagcaccacggacagcagtcacgccagtgcggagggggagggcagaagcgggaaaggctgtccgttctgaccggaagaaagggtgtgaaatttactaatacctggattatctcacacagaatcagcttctgcatcctagtctcctccctggaatgtcctccacactccaggacaccacctgcgtagatcgtgttgattattcagctgatgcctggaattgcatgacccaccctggaccaaaagagcccctgcttctccgggtatggaggttatttccctgtaaatcctcaccagaacccatgtgctgattccctgtaatcttcccacaataaatttttagcagctctgaactgcaaactgtccagcttccacagcgccatgtggatgggggcaacgtggccagagatgatggtgggtctggtcatgataacaaaagtatgaaaagcaggggaggatacttgggttgatttatccattatctcataaacatctgaacactctggtatgatgtttcccaaaggctaattaaaattttaaaaaggtttcctgtcttgtctgggatgttttctgaactgattttttgaccttgagtggctccatcctcttggccacagtctcatcactgtgcagtgggaatgttggtctcatcttcccagcgccctcaggcaggaacagcctacaaagttgtgacttatgggagaaaccttatcctggccctggtaactccatttttcttccctgtatcaccaaacttcccaaaacatatgctgctattcactgcctctccttcctcaccttcaacctctggtcattttttaagatggagttttgctctgtcatccaggctggagtgcagtggtgtgatctcggctcactgcaacctccgccttccgggttcaagaaattctcctgcctcagcctcctgagtagctcagactacaggcgtgtgccaccatgcccagcaaatctttgtatttttagtagagatgggatttcaccatgttggccaggctggtcttaaattcctggactcaagtgatccacctgcctcagcctcccaaaatgctgggattacagatgtgagccactgcaaccggccatcattttttttttcttttctttttctttctttttttttttttttttttttacaatatggcttccttctccaaagtattattctaatttaattctcatgataaacctaggaagtaactgttgttttcccttgaataagtgagaaaactgaggctcaaagaggtgcagtgatgtgtgcaagctgcacctctaagaatgagagagtcaggactcaaacttacgtctgccttagaatgaaagtctgggtcctcactgggcctgtgggcacactgtttgtgtccatatgcatgttcctgaccccgtccccaccactctccccttgtctcacttgctctggtcacactggctttcttgtgctgcctcctcagcttgttccaacctcagggctgaacactgggctggatttttatctgtcctgttcactgcttggcacatggaggggcttagtgaaacctgccaactccctgataaaggctccctcctgggagctgccacacactgcacaatagcatggagaatgtcaccctcagagtcacacaatccctctcccaaagacagctccccaattcccagaggatccgggtgaagaaatttagtgctgcagctatctccagcaaccacgagaatttaggatcaggtaaagcaaaatgagcaaatatggggtgacatgtgttggagaaaattactaaaagggggattgggatccaaaagcagaaaatggaagaagagagaaagcaagtttggtccctttgagaaacgcagcaggaagcagaagagaagccaagttggctgaagaataaaattaatgatcaaacaggttgaatgtgcatttttaaaagaaggacccatgccggtttcctcttcctactggctgacatttaagggcaggtgaggctgtgcctggctggttatccttaatgacctgccttgctcctttcctcctgagaacactcctgctatgtaagccccgggacttgacaggttggttcctgcccccttgtggtccagagtgttcatggttatggtgagacctgcagtcttcagtctatctggtggttcaactcactgaaaatgttggtatttgccatgtgtgttccacggaatcttattggcctctgtagtatataagaggaaatgcagccggacagaacaagcttgcagacccctgcgagggaaggttaagggctgtaagtgaatttatccagaaacaaggtagagcctatcagagccaggcagcccaagttcaaatcctagctccacattatcagctgtgtgtccttagacaagtgtctccagagtcagggctcaacatccatctgcccttattattcttcctgcctctccttgcaatgcttgtgcctgggggaatgggggctgaggatcatgttgggcagcagaatggggtgtgggatgaagcagttggtggggaatgagcaacagctcctctgagctcccttctgcaggccaggctacctggttcccatctgagccccacccctccccagctgggtggatttggggattttacttaacatttctgtgcctctgcaaaaggaggccaataataacagtgcctactgcaaagggttgtgttgagaattcaataagtcattacaggtaaagcacttagcttgcccctggagctcagtcagcactcaataactgttagctggtatcactgttattatttcagctaagtgatcttcacacaccgtgtgcatcagaattgtccagaagcttattcccaggatccccctcagagagcctgactcaattcatcagaggtgacctaagaatctgcatttttacaagtcccatctctccctccaaaattcggtgatgctcccctggaaattccagcatttccattttccctttgccctctccaggctaccctcagaacccagaaaaggtcaactcttcctttgtgaaacccaatatgccattcagaaacggtccccactctctcttcccctgccattttaaggaaattcgcctttggattaaggttccagcccctagttctgtacagttgttaggcatatgtatgttaaacacatatatatgtgtgtgtgtgtgtgtgtatatatatatacatatacatatatatgtgtgtgtatatatatatatcttttatatatatataaaagaatggaatgaatgaatgactagatgaataatgaattccattccttagaagagtaactctcaaagtatggactgaaccccctgcatcatctctctagggtgttcattccaaaggcagctcccagcacctccccccagcccccactaaatcagattcaggaatctgcatttaatgcttctgcctcctctgctgttccctggagtttggggacctctgccttttgctagggacctggaatttccttagagccccaaggaggggaagtggccaccccaattggccgttagagatcacaggtgtgcataagcctgcttggcccggagttctgccaagggaggttcctgcctccttgtcccactggacagctcttcctgcagccagggatgtgagacaggccctctccctgggcacatgggtacagacttctcaccccatagacagccactactgtcttcctttcttcctccaacctgccgagctctttcccacctgagggcctttgccctcatggttccctctgcctggctccccttccacatttttatactcaagcctggctccatctcctcctctcctcctgggctctgctcaaatgtcgcctgagaccttccctaatcctggtctaatgtggcctccttgctatttccaatcttacagtaagctttttccccttaatacaatttatggttatttggtttcttgtttatttcaccttgttctgattccctcaccagatgataagctgctggggaatagggtgactgttattccctagagtcaagcacagtgcctggcacacagttggcccacagtaaataatggttgggtggatggataaatgaatttttttcaaagtcaaactccttgaaagccagtttcccaggagagcaagggttttaccattgaacccatgggcatgccttaagaggtccatggcaatcctggtactgtgtgcaacattgtttggcttggtgagttttttttttcctaaaagacaaaccaaagcttccagtgcattttcaaaatgtcccccaagaaggtaaagaagcttgttttaaggaaagctatttggaatagtgaaggaggctgctaatgtgtgaggctcagtggtgttccacagcgccagtgtccaaggaaaacagtgtctgaggcagttctggggaaggcaagacagcccactgggatgccagctcagcctcttcctggctgggagcttaggcagccgctgggtttctctgggtccctgtctcctcacctttgtgggatgaggacggaatgagatagaccacagagcaggcttcacacagggaacgggtcccaacggagaaacgccagccccgccagcctccaagtatttgctcattaaggagctgtcctcaatccaccaccatccttcctgagagcaccagcgtggcgtgcccagccaccctgggttttttccttgaatgtcagctaaagaaactccacctcctcagggaggtctttttcctgacatcccttttcccccattggccaggtatcccctccctgtgccctctcacagtacctcccacctccttcacctctgggccatatttcataatcatatgctcagttgcagggataattgaagactgtgtgtctccccactggtatgtgagctccatgaggacaaggaccctgcctgaccactctctgtgggatccccagagcccacggctcctgacactcagtgttcattgattttagtggttttattcattgaatgaatgacagcaaagcccaccatctgaacagccacgcgcaagctcactccaggaccatcacaccctcactgccatctcagcctctctatcattcctgcctgccttctggagttgcatttcattcgtgaaagtacttgatagaggtggctcctgcattcattgcacacgtgtcccaggaaccatcttgggattctcatgctccatgtcactgactccatcagcttccctggtttacaggtgaggaaggctcagaggcgtaaggacaaggaggaggatcatcataataacatggttttggaggactggcccaagcatgattcgctttaatcctcactatagctctgaggtctgcactgtgatccttttacagacctgggagctgagtctgccaagagacagagtcagcagttgaaccccggtctgcgtgaccctaaagcacatactctggactgcatgtgatcctgcaccgagttggcttcaaatccagtccccagcccctgagcagggccctctcatccctccaaatctgctctctcttgtcatgcatcaagctctgaaaatctataccctccatgctgtcctttcattaggctctgtggccctgagaaccacagcctgtgatgaggtaggaccaacagctcctgccccatgttaagatgtccaaagagccaaggacaacagatttgttcctcccgacaatgcccactcttctctgttttcttgacaataaataacaaaattccaaccacttacataagaccaggaaggctagaaaaatacattttgaagtaagtgatattctacaaacatccccaaggggagcatgaactctgagaaaggacctcaaacagggaaagccaacaccctgaaccaaggctttctcagtacaatctcttacaaaaccagagtgaattgcccaagaatagccccaaggcttctgtgaaatttgcaaaggacgttcccatccctcatccacatgggaccctctatgtcgcccgtagtatggggaaacagcacagggacagtgacaaacgcctttgtctcagagctcacagcaatggcaaggtggggcccagacatccgagacctgtgctgctgcagtggagtggggaagagagagctgcaggcagtgcggtccaagaggatgcagggaccctcctgggcctgggaggtgttgcatggaatgtggcttttgctctgtgtgcagtaggaaatgctggagggttttgagcagaggagtggcatggtggtctaccttacatctttttttttttttttttttgagttggagtcttgctctgttgccaggctagagtgcagtgtagtgtgatctcagctcactgcaacctctgcctcctgggttcaagtgattctgctgcctcagcctcacaagtagctgggactacaggcatgtgccaccacacccagctaattttttgtatttttagtagagacggggtttcaccatgttggccaggctggtcttgaactcctgacctcatgatacgcctgcttcggcctcccaaagtgctgggattacaggcatgagccaccgcacccggcctaccttacatcttaaaatgactgttcaggctgctgtgtggaagagattgtgggtgggcacagttaaaagctgggaaaccagccgggacccactggcaataattcagatcaagctgatggtggctgaggagtagttgttatatgtggtcatgttctggaagtgtcagcaggatctcctgacagatgggttgtgggagatgggaaaaggggaggaaagggcagctccaccggctgggagtagaacaactagatggacttggcaccatttcctaagagtgaggacaggggacttaaactgaattctctctgaatcccaaccccagggctccaaggtcaacctgatgctttggcttcaagagtctgtaattcttatccagaaagataagatccatccatccagttattcattcatttgtagcattaacaaacattcaccagtacttaccatgtggcaaacatgggaggcactgtagacatgaggattaattagactcataccctgccctcaagaaactcataattcagaggagattcagagatcaaccatctccactcatcaattcagtcgtttggtcactcaacaaacattcattaacactcaatttctgacaagcaagtatcgtggtagggattgaagtggttggtcatgcccttaagaaagtcctaacccaattggagagcctggggttagccatcctcactcaaatgtattcattcattggttcactaaagagtcactaacatccagcctgtgccagggtctgggagaggactcctgttggatgacccaacaatagactctggtgagtgtctccaagcaacaaggcctccctctggagccctggcctcctcccagggttccacatgttgctctcccaatgtgagcaagccctggtggcagcgccagggtccagtgcagcccctccccacagcatgctgggggctaattctgatgtcatctttctgcagaaaaccattagaccatccctccagactgccaccctcaaagccgtctgcccaggccccatctgacactcttgacatctgcaggtcccagaccctatgatgtgtccactctggaggctcctcatcttcctcgggttgctggccttgcccttggcaccacacaagcagccttggcctggcctggcccaagcccacagagacaacaaatccaccctggcaagaagtaagctaagccccgggctctgcctgctgcctacggggctggggaggtgggaaggtgccatctgggctccactgctaacccgctgggtgacttcaggttagtcactttccctcttctctttttcttagacctcaagtacagaaaattgaggttgtgttgatcatatgccaatttctagcacatcctcattggcacaaatcactgcaaggtcccccttttgttttattttcttattttccccctttatgacttattctcaccccatatccctactgccttggcaggcattgcagcgtgtttaatggatgtacttaaatatgcctgtgtccttgtatgtacagtactttaatttacataaattgtattgtactttaatttacataaattgtatagtgttgggtttcactcagcactatgctgttgacatctatgttgcttcagctggtgcagaaagagccataagattcatccacctcagtttatttggctgctcccctctggatggacatgcaggttgtctctaactctccatgattataaactacactgagatgaacctccttgcaagtgtccctgttacagcctgtgggagaatttccctgggataaacccagaaggagagtggttgggtcctggggtagaggtgaactcaatttaaccaaaactgccagaatcctctctagaatggctgtgtggtctacacgtgctccagtaagaaatgagcatacctgtctccccatgttccccagcactgccgagtactgagctgtatcagtcagctagggctgtcctcacaagacaccacagactgggaattaaacaacacacattcattttctcacagttctggaggctggaagtccaagatcaagatgcaaatagggttggtttctggtgaggcctgtcttgctggcttgcagacggacaccttctcgatgtctccatacagccttttctctgtgcatgcagagaaagagatctgtttcttcttataaggacaccaatcccatcagtttagggccataccctaatgacctcgtttaaccttaattagctctttaaaggccctatctccaaagacagtcgcactgggggaggagagggcacaatttgatctatgacactatttttctacttttttttttttgccagtttgatgtgtagttgagtgataactacttgttttagcttgactttatctggtgagtgggaagtttgagcatcttatacttttgttaaccattttgactttttttcttggagacagagtctcactgtgtcacccaggctgcagtgcagtggcatgatcttggctcactgcaacgtccacctcccaggttcaagcaattctcctgcctcagcctcctgagtagctgagattacaggtgcatgccaccatgcccggctaatttttgtatatttagtggcgatggggtttcatcatgttggccaggcggtctcgaacccctgacctcaagtgatctacccacctcggcctcccaaagtgctggcattacaagtgtaagccactgtgcccagccccattttgacttctttgaattccctgttcttaccttttatccatttttaaatttgcttttctgggtttttttaatcctctttgacttgaagagacattacttaattcttgacattagccctttgtcagatttatgcattgtgaatatttctcccaaactgtcatctgttaactttgtaggtccttcactgaacaggaatattttcaaattcatcaatattttgttttatagtttgtgtttggaaagtcttaagaccttgctcctacctcagacatattctactttgtttttttctaatagctttatagttttacctttcacatttaagattttaacccatctctggaggctatctttatgtatgcctgtgtatgtaaggcagagattcagcttcgcttctctccatatgactcagtttccccaactcatctactaaatgatcaaattcccaaaaatgaggattcactgctgaactccctatgctgtatctgtacatctgttttacaccaataacataatattgtaaatacaacatctttgtaaaatgctgttttatctgacagacctatattcttccaaatgaattttagagtgtgttgagttcctttaaaaaattcgtctggccgagcacggtggctccctagcactttaagaggctgaggtgggaaatcgcttgagcctaggaattcaagaccagcctgggcagcatatcaagatcctgtctctacaaaaataaaattagaaaattagccaggcatggtggcacacacctgtagtcccagctacttgggaggctgaggtgggaggatcacttgtgcccaggagtttgagactgcaatgagttataattgtgccactgcactccagcctgggcaacaaagaccctgtctcttaaaaaaaaaaaaaaaatcagggcgggcgcagtggctcacgcctgtaatcccagcactttgagaggctgaggtgggcgaatcacaaggtcaggagatcgagaccatcctggctaacacggtgaaatcccatctctactaaaaatacaagaaattagccgggcgtggtggtgagggcctgtagtcccagctactcgggaggctgaggtaggagaatgacgtgaacccgggaggcagagcttgcagtgagtggagatcatgccactgcactccagcctgggggacagagcaagactccatctaaaaaaaaaaaataaggctggaaattggattggagttaaaatgaatttgttaatttaaagagagttgatattttagacttcccaatcataaatttagtgtatctttccatttattcagattttactatatatcccataagagaattttaaagtcctatcaatgtattgagcatgatttattaacatgattcccagagaatttatagttttcattgccatagtaaatgctacctaatcttctattatattttctagttggaattgcaggtacagatggaaggaaagctgttgacttcttctgatattcaaaagccttgctgacctcttatatttttattgttttatttattctgtaggtttttctatctaggggattatattgtccataagtagtaatagctttatcttttctcttctaagcctgacacttcctgtgcctttttcttatcttgcattgtagccagagccttctacaggaatggaaattaatccagaattcccctacaagtaaattttctgtgggtttttggaatatagtgtttatcacattaagcctgttccttatgcccctagctttatgaatttttcttactcataagtcagtattgacctttaacaaatgtttctctgcatctaaaagttaatcacttttttcctccaacctactaaatgataaattgtattaatagatttttctgctgttgaaccttcctaacacttttaaaatgaaagtttttatgatgtactgttagattttttttttttttttttcaaatggagtcttgctctatcacccaggctggagtacagtggcgggatctcagctcattgaaacctccacctcccagcctgggttcaaatgattctcctgcctcagcctcccgagtagctgggattacaggtgcccccactaccacgacctactgatttatgtatttttagtagagacagggtttcaccatgttggccaggcgggtctcaaactccagacctcaggtgatccgcccgccttggcctcccaaagtgttgggattacaggcgtgagccactgcgcctggccaagatttcattagctaataatttgtttaggatcttagcaaacttttcatacataaaactaatatgtaactttcttttcttggtactgtccttgaggctaggaaagttatactaacctcagagaatgaatttaacgtctttctgtttttaaattttctttcacatttatctctttataaaagtttgataaaactctgcataaaatcttctagatcaaaagctctcagagaatgagatcttcaatcatcatttttatttgttaagaaatttcttaatttctttggttatgaatgttttctatttttcctcattgaaacttggcattttgtggttggcataaatgtatccttttcatttaggttattgaatatattggcgtataattctgaacccaggtaacctcatttatacaataagtgcagttagaatgttagttcacgaagctgcttttcaaacttaaatgctggaaagtatgtgaaaagttctttgactatgcatatgtttattgctatgaccagtagcagcttctctgcagtaacccagagttctcagtgtagggcctgatctcaggtagggtcaaggcagtgaaactatattatcagttagagtacttagctgcaggcaacagaaaacccaactcaacctggcttacacaataaaaaaagttgtcattttacataactgaaagtcagagataggacaagctccaggtttggttcagtcatgagttcaaagtttgcctccagactagattttgtctatttctcagctctgctatcatcatggttttatcctcatgctggttcccattgtggtaggaaaatggtggcccatggccattggcgctataggctgtcttgcttctttccgataggagaaacagaaaggaattttcccctcttgtttggtctgatagagccaactgggtcatgtgccaactttgaacccaaaagagtcagtgagggtgaggcacacctgatggttcagataatcaacagcctcatctagaccaggaatttaagggagtacttgaataaaatcagggttcagatgaggaaaatagaatgaataaatggataaatggatggatagatggacagatggatggatggatggatggatggatggatggatggatggatggatggatgagtggatggatggatggatgagcggatgaatggatggatggatggatggatggatggatggatgagtggatggatggatggatgagcggatgaatggatggatggatagatgaatattagactggcaaccactggtgtctgctgctcacaaattcccaagcaccactataatcatgaaccaagaactactaagagttctgggcatacctataggttcactctatccttgaaactatttgtttaatatatttctctcctagtagacataaaactggtttgtaccctcagtgaccagcttggggcctgacacccagtagatgctcaataaatatttgttggatgaatgaatgaatggtcttaatattcctcacaagaaccctgtgaggtactgcccctgttatacagatgaagaagccaagacccagggagatgatagagccaggatttgaatcaagatctgctactccagacacattcttgtttgtaagcgacagaaacaaacattgctgaaacaaacaactccaaggtgctgtcttggaggagggggatggggtatgacaaaggtttctgctgctctggagtaacccagagttctcagtgtgggaactgatctcagggcaggtcaaaccagtgaaataatgtgccctgtggtacactacgaggttcatcagagctgggtcctcatcccaggcaggagggtctagagacaaaatagaaaggacttaagcatctccatagctttaaaaattccttcctttgggagatttattcctttctggtggaagctccactgggtcctgcaatttattctagacatggtgtggagcaatttacatctattctttccaggcttacccatctaattttctcttcaaccaacattgactctgatctacatcctgtatgttagctccgtgctccagactgaaatacagtgttgggtgaactttcaaccagaataccccactttgagcagctgttgcctgccacaccctctgcaggtgtttttctttatttctcacatcaatcttgcaaagcataatttcatagatgaagaaggtagatctccatggggaggtggtgacatgcaccactcactaagcaatcagatcttgcaccagcctgcaacccaggcctccgaatcccaagccccccaccttttccgtgacactgtgcaaagtcagtggtccttgtgcatttccagttattgctcagggcctcataaagcacaacgcagaaagccgaattcagaacatccactttggggacagactgaatgcctcagcacaagtggccccagggctggtgggctggctaatcagcggcaggaaacaccagcagcagcaagagagcaggtgagaccctgagttctatccgtggccctggaactctttatagagctctagatcgaagggtagagctgatggggggctggggaggtgcaaggcctgtgaagagggaaggtaggaagattgaaagaagagaaggtggaaggcccacacaaggaacagtgggggcccagctgcacaaatcaaaactgtgtggcactgttagggccactctggggcagcttgcagtccagggctcccgcacctgactcttgccctcagagcatctgtaaaagaatcacagtccaaatcccattgccaggccctctttatagtcggacagccttgtttctcagcaggaagccttacctgttctgaagtccctcacccttgtggggcctctgctctttccttgtgcagcatcaacatcaccaacattcagctggactgtggtgggatccagatatcattccataaggagtggttctcggcaaatatctcacttgaatttgaccttgaattgagaccgtgagtcatacagaagcagaatctgagaggtgctggccctcctcgcagggaacctgggaaattcagatctttctgatcccaacctaaattcaaatcctggcttccaaagccacttgctgtgtgaccttgggcaagtcacttcacctctctgagccttggtttcttcacctgaaatatgatgacaatcattagtcagtggaaggaagtcatttgctcattcaaacctatgagagttcacaacaactgggcttgattaaagagagaaagggagaactgctgtaatcatctcatcgcccctgctcaccatcctcctgttcaaactatcctttgacatccactgcccccaagaaagggaggatgcagctaaatgggaaagatttttgaaacagagattaactctcaacgtttgaatttccaaaggcctatttaaggggttttcagagtcactctggctacagctgttttctctttaatcactgacttcaggatttaactgggcctagtttgttgaaaggactcagagtgccaggggaagccctaacggtggacagtgcccgtctttgccaatacggagatttctactctttctctacctcctccccttgcccttcctcctcttcctctctcatctgcaggtccttcgataacaacatcgtaaagatgtgtgcacatatgagcatcgttgtggagttctggctggagaaagacgagtttggccggagggatctggtgataggcaaatgcgatgcagagcccagcagtgtccatgtggccatcctcactgagtaagaccccagctgcccctccccagagctgggcctccttcctgatgagccccagctgcagggtcacttcctgaccgtctcctaaattagtccaaagcagatctcatccttcccccgggatctgctcctcctcccatgttcccatccgtgatgaccctaccaccctcccagaagccagactcttctccctcctcactcctcaagcccatcatcacaagttcccatcaatgacttgctagtagccctcagcttctctcttttatctccatctcctactccactacctggagcactacaggaaactcacctggctttccctggcccggatctcccctcctacactccattcctcatcctgcagcagaaataactttctaacacagaaatctggccatgcccaagcccctgctccaaagcctccagtggttcccagtgccctctgggtaaacagcaactcccaaatttcactcaaggccctgcttgtcctctcccctgccaacttttcagccctttgtcctccaccacacaccgtacattttcacaccactgtgcctttgcacatgctgatcttcttgcctggaatgcccgtcccatcttctatgaagctcctccttatcactcattcattcatatatttcccaaaaacctactgtatgccagcaccacacctgatgctagggatacagtggtgaacaagacacaaaatacagctttaataaagctccatagactggctgaccaagtctttcaatttcaactgactgtaagtcccttgaaggcaagacttgtgcctgatttatctctgtaattccggaatgctgaaagcaatgaagacctcagtggatgtctgttcatttattcatcagatattcattgagtacctagattgtaccagacattcatgggaggacggtgtaagggaaagactctggaatctggtgctctattgccatgtttctaatataaccagcacttattagctgtgtgaccttgggcaaggtctgagctacccctttgatgatcactgacaatgatacttctggcatggggctgagtgaggactaaaagactgtggaaagtatactcaacacatacctcctggctttaatattgcctggattgctctgttctgttctgtgcctctacctttctttctagggctatcccaccaaagatgaatcagtttctctacaacctcaaagagaatctgcaaaaagttctcccacacatggtagaaagtcaggtaagtttagaaaaaactttgcatcttgagcatccttgagtccgagggttagggcatatatccactggcaatttagcaaaggatttcaaacattggattttagagcttgaaaaatctcaatttaaaatttcagtttggccatgagttttgccagcctatccttgagcaagagactttgcctccctgagcctcagtgttcccacctgtagcatgggatccaccatagtctctatcttatatgatgaggatttgtggagacaaagcgtcgaagtgttgtgcatgacactgagcaggtagttggcgctcactacaagggagctgctctggccacgattcctactggaaaaaatcccatggagttgaagtttcctgccacagtcacttcagttttccttttccagcccctggcctgatccttctctctgtgctgatggtccaggtatgtcctctgatcggtgaaatcctcgggcagctggatgtgaaactgttgaaaagcctcataggtgagtgtctggtccatccagtgaggacttcttaggactggcaagtggctgaaagaggtacccccggccctggagcccccagggaggcctgctaaggggcgtctgcatgtgccgtgagaacactttagaggtgaccatattatgatgaccacactgtcccccaagagagctgggacagcagaacgtacccctaccaagcaggctgtgccctgccaagtcactgaagtcatcaggttaccagagattcgagctgcttccaagatctccacccaatccagtagggaacactggccccatcccaaacctgagaccatctctactccagttacagataaacagttatagtccctgcccatatagagctcacagactagtgaagtgaagacaccaagaagcaaacaattcagcatcatttggggagggttttcacgtgaacgctcccggcacctgcctttggtcaccatggatggatgagggtttcccttcggtgtgggagttgggaggtgggcacactggtgacagacgctacctcttctccttacagaacaggaggctgctcatgaaccaacccaccatgaaaccagccaaccctctgcatgccaggctggagagtcccccagctgacttctgctgatcagaaggaaagtccacatcttgcaaccttaagtctcccttagagtggggcttctgctaccctaaaaactttaccccaggctctgtggacataccatcctctcctacaataaactctagctctgaagggtgcacaggtccctcccacctgggccctggggtttaggtctagaagtcagacctgatgaagtatcctcctgagaacaaatatccctatggttgctcatcagcccagaaataccaggacaaaaaaaaaaaaaaatgcagggaggggcctgttgagatttctcattctttcattctttcattccatatttattgggcacctaatatgtgtcaagaatactcctgggctccaagagggtgtagagaaagggtgagagagtggaaaagtgaaaccatgggcacaaacacatctgagctcaccttcaattcagctcaactggcagttccatgagggtgtaggtgccatgcagcatggtgacgcatgaatcccagccccagcatacagctggcacagagtgagtgctcagtaaatatctgtggctcaatgagtggatggattctagtcttaggatccactagctgcatttgagacaaagcttgttatctttcggtcttcatcatttgcaaaatggaatagaaatcttgcaagatgtggagcaacagaagccatcccatgctgctggtgggagataaattctaccaccactttataaagcatctcctagagttaaacatgggcttactttacaactcagcaattccactacctagtgtattctcaacaaaaatacatgcacgtgtggagcaaaaggcaaggaagctcatagcagcaatgttcgtcataaccccaaactcaacatcctcccatgcccatcaaaagaatgaataaatagaatgggcagatatcttgtgggatgggcacccactggaatctctatagtgatggaaatgacctacaattgcacacagcacgtggatgaatctcataaacagaatgttacatgaaagaagccatacacaaaagggcatgtgttgcatctcccatttatgtgagtccaaaaacagcaaaactaatccgtgccgccagagataagatagtggttaccttggagcaagggttagatgctaggagggcattgaagggggcttctggagagctgatagcattctgtttcctgatctaggtgctgggtatgggaagggatgtttggtttctgaaaactcattgagctatttacctatacacatttttcttatgtgtaatgtactttaacaattttgacaataaaagtattggccggttgtgatggctcacacctgtaatgccaacactttgggaagctgaggctggaggattgcttgaggctaggagttcaagaccagcctaggcaacacagcaagaccctatgtctacaaaaagcttgaaaaattagctggaggtagtggcacacacctgtagtcccagctacttgggaggctgaggcaggaggattgcttgagcctaggagttcaaggttacaataagctatgattgcaacactgtgcttcagcctgggtgatagagcaagaccttgtctctctaaaaagtccatatatgtatttataatgcaggatgcttgtaaggagtaaagccatgaaaaaccatttgcagtgtatttcacatgtgatgggttcatgggaaatgcttattaaatgtcacttaatccagccaggcacagtggctcatacctataatcccagcactttgggaggccaaggtgggtggatcatttgagctcaggagtttgagaccggcctggccaacacagtgaaaccccatctctactaaaaatacaaaaatcagctaggcatggtggcaggtgcctgtaattccagctactcaggaagctgaggcaggagaattgcttgaacccaggaggcagaggttcagtgagccaagttcattccactgcactccagtctgggcaacagagtgagactccgtctcaaaaaaaaaaaaaaagtcaattaatccattgttaatgatttgactcttgactattcaattattaaatatggattcccactctcctccaaccaagagttgaaaaagcaacctgagaaatcaagggaaaataacacacacatattaatcacagtagcacacattaagcacttgttatataaagagattcttggtgctcagagcttacatccagcatcttatcaatgcctcccagcaaccccaccagatacaaaatttcagctcactttatgcatgagaagcctgaggctcggagaaataaagtcacttgtctaaggtcacacagtaaggaaatggccacaatgactgcactcaggcagccagctctagagcccacactctaaaccactgtgaatcctccttccttccttccaacacccctcaccccaccacacacacacacatgcacacacgcaagcgggggctgatgaaatatgtgttcagtgggactgacaagctcaaataaggaaatgtcaacagctcagagatgagaatagggcaggagaatctcgcttctctgtctttcaattcaagctccctaatccggaatgcttcatcagggatttgcaaccctaaacgctagtgttctccttgccagctgtgagcttgtggggttcttcctgctcatgattcaaagagcaaacacaggagggccaggcctggtccccaacaaggctacctggttcactggtgaaggcagcttttgtctgccttcctcctgactcttcctgggctggcgcagggcttcctgtagggacctccttgggtttctgacattctgttttcattttaaggttcatggagcatggactcattacatttcctcccagaagggcttgttggacaatggacctctattaggatactggggttcacactgggggatggtttaaggcccaaatgcagccccaaatgttcagaacctcagtcctggctctgcccctctgagctttataacttccatgccctcccactactgggcactgactctgtgccaggtattgggctgggagctacatgtgtttccccaaattgtagccctcctgcagccctaggaggtggatgtccttagctccatgacataagcaaggacactgaggctcaaagagggggtgcaacaaagcatttctagagatctgtcataccacatcgtgcctacagttaacaatgctgtattgtacacttaaaactctgttaaggccaggcgtggtggatcatgcctgtaatcccaacactttgggaggctgaggtgggcagatcacctgaggtcaggagtttgagaccagtctgatcaacctggtgaaaccccacctctaccaaaaatattaatacaaaaattagctgggtgtggtggcacacacccataatcccagctactcgggaggctgaggcacgaggaatcacttgagcctgagaggcagaagttacagtgagccgagatcatgccactgcactcctgcttgggagacagagcaagactaagaaagaaggaaggaaggaagaaaggaaggaaggaaggaagaaaggaaggaaggaaggaaggaaggaaggaaagaaagaaagaaagaaagaaagaaagaaagaaagaaagaaagaaagaaagaaagaaagaaaagaaagaaagaaagaaactgttaaaaaaaaaaaaaaaccaaaaaactctgtggatctcatgttaagtgttcttactacattaaaatttttttaaggccatacacggtggcttacacctgtaatcccagcactttgggcagccaagacaggtagaccaattgggcccaggagttcaggccagcctaggcaacatggcaaaaccctgtgtctacaaaaaacatgaaaattagcccggtgtagtggtgcacacctgtagtcccagctacccagaaggctgaagtgagaggatcacctgagctcgggaggtcgaggctgcagtgaactgtgatggcgccactacagttcagcctaggcgacagaacgaaactgtctcaaaagaaaaaaaagaaagggggttggcaggggaagcgctccaccaacgggagggctccagggaagatgggcaggtgctttctgaactgaaaactgtgatgcaaacttgcacttgaagtaagagcactgaagccccagatgacagtctgacttcacctcttcccagctgagatgaccctgtgcaggtcacagccctccttgaacctcagtttccccacaggcttgttacaggtggcataaagctctagtgtctcacaaaaggttatcattagtagtagtatttttttttttgcactttaaaagcaagtgcaaagattaatctcaaaagcaaggggagcttgcctgaagcaaaccctacttgagaatatatatttttttcatctaagttggggtttctggctctctgggaatgctctggagcttccaaggccatctgaagaccctctgcaactcagtccccacgctgacctttctcctggggaggagatcctgcatcccattctcacattctggagaacagaccttgcataggtcagagccctttgaaaaatcaaaccaattctgccctttagaaatggatcttttttttttttttttttttgagacagagcctcactctgtcacccagactggaatgcagcggcatgatcttggctcactgcaacctccgcctcccaggctcaagcagttctcctgcctcagcctaccaagtagctgggtttacaggtgcgcaccactaatgcccagctaatttttgtatttttagtagagatgggatttcaccatgttggccaggctggtcttgaactcccgacctcaaatgatccacctgcctgggcctcccaaagtgctgagattacagatgtgagccaccacacccggccagaaatggatctcttgattgacaaaacaacctgagcaaaggctcccaaacacaattgcaacctgagaagcaggaaggaaaggcaccacctacagtttctgagaaacacatggagagggtattgacatcaccagagtggggaaaacctcttgaaatgttcgtggtgtgtccttccacttgtttcctggtgccctgagacctttcccctgttcagggcagggagcatgcagtccctgtggccacaaggaagggcagtttcaacagaagcagaaacaaggctcttgactttcaagagcctgggtttttgataaagtggtagtgacagagaacaaacaggtggttgccagcagatgaaggcagggtgtggctgtaaagggacccatgagagtgcctttggggggatggaactgttctttaccctgattatgatggtggctgactatacatgtggtaagactcaaaggaccataccactaaaagaagtcaattttactgtaagtttttttgtttttatagtcttggcttttgacttgttaaactcagggcataggagagtctgagaacagcatacacacaatgaagttgaagcaaatcttcctgcccacaaaactagaaaatgccctatgttgggttggtgaagtgtgagggtccaggagaactggaaggagcatagttctggtgggttctgatggtgcctccgtcccttgctgctcccaggcagacctgagcatgggatgaagggaacagaatcccaggcacatgtatgggatccagggacagagggcgtctgtgtccacactccctcccagagccagaagagggcatgagaccccagggagagaagggtaaagggagggtctaggtggatccaggcaggagggcttgggcagcccctcacagtcctgtatcaggcccaaggaactggcgaacagcagaacaattctgtgtcttacaaacgagttgaaagtaaatgctaaatccaaagggacctttcaccaggagggaagtacagtgtctctgcaatctaggggcagatggcacatggctgtctcctatattgccagccaaaaatagggacaggcagcctccttggtacaaacaaagcccctagcacagacatgaaaccccagggggaaattgggacatttctgttcctgagcaaaatggcatttgaaatggtaaagtatagataaatcagaaagatgtgtggacgcctgagtttatgaactgtgattcataccagctccccagacatcatctccccatagccctgtgaggcagattttatgctccccattttacaggtgaggaaactgaatgaagttcagggaactggactgacttgcccagggtcgtaggatttgaaccagggctgtttgagcccaaattcacccactttctgctgcaatacagacacagcctcccggcctcaaaccagagggtgtaagctttcattaactggctgcacaaactctactaattccttgccttatctgcctcagtttccccacaaggatagtagcaacctgacccaacccacaagagttatacgatgggaccactgtgaggatgattgccatgtacaagatgtgggcagagtccagcaagtaccttgaatggataattaagttcaaagccatggccccaaacccttgggggcaccacccagactctggagagcagtggagcaggccagtgaaggcctagtgtgagggaggcagtgtggcccactgattagcagggactcagacagacacagagggtggcagggtcaattgactccaacactcactcgctgtgtgtccccaggaagcagtcaccctttctgatcctcagcctcctcatccaatgtatgagagacaacaataccaaccactcctgaagaagatgaggttcaaatatggagagcacctggcatgcagtcagtgcttaataaaagcacatttattccttctctctccacttttgcttataaggtgttaggttttgcagggtaagagctgcgctcactggtccaggaccttggccttcctgtgtcttcactttttcatctgctgaacagactccaagggccccagtggtggggataaataaatgcctgattactccatttagggaaaggtagaagaaagggtaggatagagaccaggatgccaaaggatccctcaggcctgggaacctggaaagacttttccaggacctaaaagagaagcggcggggcactgtggctcacgcctgtaatcccagcactttgggaggctgagataggtggatcacctgaggtcaggagttcgaggacagcctggccaacatggtgaaaccccatctctactaaaaatacaaaaactttgccaggcatggtggcgctcgcctgtagtcccagctgctcaggaggctgaggcaggagaatcacttgaacccgggaggtggaggttgtcatgagctgagatcacaccactgcactctagcctgggcgacagagtaagactgtctcaaaaaataaaataaaataaaaattaagtgaaaatttaaaaaataaaaagggacgcatgaaagtgtaaagttcacaggtggggaaatcaaaatggccagcaagtgttgggaggcaccttcatctctcagtgcagtgattcggggaaaggacctgaatgtggatgtctcaccccaggcaagcactgcatctctggacaacttgcctcacactcagcctcagtttcccccttatagaataggagtacagggttgtgaggattttgtgagatgctgcctgtgaacaccatggcaggccaggcatacagcaggagctcggccagtgtctgctgttggcgttgtttttgttgttttcattctccagtcagttgcattctaactctgctgcatcctctctgggtctttcagcacttgtccccactggatctcagtttcctcctctataaaagaggaggagtcacctctccctctcagggttcttgtgaggacagagagctcctgacgtgcaataggggctctgaaaacaggagacccttgccctggaatggagacgcaccccagatgtaggatgcagtgtgactcttttgacattttaggagaaagaatcctccaactggagcaaaaaaattagagcaggagaggaaaggggccaagagatgagactgaggtcccttcctgggctctgtctggctgctcctttcaatgctccaagctaccttgggagcgtgggtccccaaccttggctccgctcaggaaaccataaagtcttgagtaacatcccatctcaggtttttctctgtttatcttgttgaccaaatagcttaactgtctcacctgctaatgtgattggcaattatttactttggagagccctgaaagacactgtcagattgcagaattctcaattatctagaaacccatcacccaacacatgcttcctcgtccccatactataaaagaggctgactcctcggcagaagtgagtgggggagagagaggagaccaggacagctgctgagacctctaagaagtccaggtaagagccatccattctgtggcccctctgctacccttaacggcagggatctcaggctcctgccctgtggggcagtgagtgatcttgatcactcactgggggctgtgcaagagaaacagacctggccaatgtcagggatgtggggatggccatttgctctgctgtcctaagagaccagtaacattgatatagaaatgggcactattaatgccgtaaatgaaagcctctaaggcataagttttagcttgaggttaccaatgtggatacagatgatccaaaaacctcctaaaattcttcacccaattttatacattttgatgcattttttctgagactaggatctttagcttccattggattcataaagggtctgttgcccaaaagagattcagaggctgtggtcaaagttacctccctaagaagggcacaactggctctttggaccaaagacctttcatttccagccttccaccacaaggatggagctttagctgagtcagccaatagatggaattttgcacaaagtcaccagttgtctccaaattgtaggtactagtgctggctctggacaactctgctggctgccaaatagacctgtgagaggtctgcaagccaaacctcaggggttgaccggaattccatccagggcagcttgaaggagaagagaaaggtgtcaaaatgatagaatgcatgtttgtgtgttgggtgaggggagggttgggagacctgccttcaaccacagctctgccatcaatttattgtatgaccttgggaaagtcactacccctctttggtctcctggttcttctcatgcaatgaagactttgatggccccaggaattccccaacaaaggtctacatgagatggtggctgtggccatgcgacccctgtattgtgtgactttcaagggcatccaccaaccatcatggcctgagctcaggccaaaggactgaacagggatgatctaaaacagttcaattcttcagcacttgcacgtttaacccttctcatttgctttgtctgaagagcagcaatgattcaaaccattgaagcaagcccgattggagaataaatctgatggttacttaatttaaccgagggttcacctggctctagcttctaatcctctgtccaccgtgtacttgtgaccttggggaaagttacccacactcggtagtacacaagtgggtttcaagaagggatgggagtatatttgaaactcccaactgcaaactcacttgacctctgtgagccttggtttctcctactggaaaatcagacaagtgaactgtgggcaagatggagtgaggtgaggctgggattcttggcaagaaggaaaaaaaccctcttctttggaatgtggtggagtggggctgtctcctttttaggcccctgatcagtggtcctcacctgtgcaatgcaggtaacaggtgcccatgtcttagggttgtgatgaagatgaaattgtgtaaagtggtcagcctgttgcctggcaaagagaaattgttcagcagtattagctattactagtgaccccctggtgttctggggagcaaacaaccccaccccccaggtgtcagggcaggtggtggataaattcctctctgatacccatgccatgttggacttgtcattctggccacagatactaagagcaaagatgtttcaaactgggggcctcattgtcttctacgggctgttagcccagaccatggcccagtttggaggcctgcccgtgcccctggaccagaccctgcccttgaatgtgaatccagccctgcccttgagtcccacaggtcttgcaggaagcttgacaaatggtgagttttcaggggtgtatgtgtgcatgtgtgtgtgtgtgtgtgtgtgtgtgtgtgtgtgtgtgtgtgtgtgtgtgtgtccaaccctgcaaagtggggagggacagggctggatgggggagggggcctgaggatctggaattgtcagatctgacccccagagacccttacacccatttccagccctcagcaatggcctgctgtctgggggcctgttgggcattctggaaaaccttccgctcctggacatcctgaagcctggaggaggtacttctggtggcctccttgggggactgcttggaaaagtgacgtcagtgattcctggcctgaacaacatcattgagtgagttgtcctaaaatagagctttgatctccaccagggaaccccaggtgaagatctgccagccccaggcagtgaccctgaagcagcgaccctgaagcagcgagggagcggcctgaagatggagccaggactcagttctgagacccatctccagtttggcagggacacccgtcctccccaaaccagcaatgccctcagttctaggcatgtcctgaggccccagcatcatctataatcctcaccacaaccctttgaggtcgatttaataatctccagtttgcaaatgggaaaaccaaagcacagaggtgcctgtgttcacgctgctagagtgatgccaagtgagtaaggctctcactctactatcctaactccaaagccaaggctcttcccactacactgtggtcattttgttctctgcacctgtgaaatcccttagaacacagacggcctttgatgttagcgagagtataacctgcccaccttgatgatatcaatgtgatgaaaaacagtgtgatgtccatggaaaggtctaacgtggagtttcccatgagacacccaagagctcgcaaagcaaaaagcaagaatggaagcttgatgccagtgagccggcagagcctggttcctggataggactggatcaaagccatttccaaaatcctacccacccagggtctcactccctgacttggagacagacagacttcttgactttgattttcaaatgtacttgttggatgacctgggacaggacaccctgtctctctgtgcttggtttctccatctgtaaaatatagattatagaacccacagagaaagtgtattgtgaggactggaaaaggtgtaaatcacctggcgcagtggctggctcagtgaatggcctcacccatcaaatggcctccctgcttgatgggtgcggtcacaggcctggcttctcctggagacaacagggtgtgatgatggatggatggttggaaagataggacaatgggagaatggcttccttccaccctttctgcactctccctgacttcctgctcctcaattcccatgataaacattggtgattggccacctgacagggtgagtgattcttacccataaatgtttgtgcagatttacttccagttgcacctgcatcatccattcatccactgaccaatccatcatccagttatccatccttctacctaatcacttactcttccatccatgtacccacatatccactacccaccttcccatcaatccagtcaactaatatgaagtagccactttctttgtaaggctcttagctggcatacaggatgcagatataatccagacacagttgttgtcctgaatacctcatagactggagataaggaaagggccctgtgtgtgtgtcagatctgttccagggcagaggctggaaaagacctagtgtgtgactcagaacccacgtggcttaggctgcaagactcccctcccatctccctatcctgggtgggaagctctacctctgggatgggtactgttaggttaaagatggtttctgggtttggagctagaggagctaatgtttccccctccaatattactccctggacagcataaaggtcactgacccccagctgctggaacttggccttgtgcagagccctgatggccaccgtctctatgtcaccatccctctcggcataaagctccaagtgaatacgtgagtgggtcccaagagggggtgagaggatggctcaccgagggagaccctggtgaccatggttaaccataacgggggtattggagtctaacagacctgagcctccaacttcagctcatttgctgctatgctaagtggccttgggtcacttgggaaactcacttgacctcttaagtctttgtttctcctgctagaaaatgagataagtacaactgtgggcaagatggagtgaggtgaggctagcattcttggcaaggagaaaataaccctcttccttggaatgtggtggagctagataccagtggggctgtctcctttgcaggcccctggtcggtgcaagtctgttgaggctggctgtgaagctggacatcactgcagaaatcttagctgtgagagataagcaggagaggatccacctggtccttggtgactgcacccattcccctggaagcctgcaaatttctctgcttgatgggtgaggccagaggagcagcttatcctgcccagagatgacagggtgtgatgccggatggatgattggaaagctgagacaatgagagaatagatgagtgagaggctgaaagggtgggaaaatggatgggaaggagggagcgtggaaagatggatggatggatggatggatggatggatggatggatggatggatggacagatggttagatggttgggttgatggagagaaggatgaatagatagatggatggatagatagatgatagatagatagatagatagatagatagatagatagatagataaagtagtacttattccttcttagaccaagctaaccaattttatgctggatctagcaacaagaaattggagtttaagccctgcatattacaggggaatggggatagagggcttcctgtgtgaacctgggtagtgcttctccaatttagttctaagcttacttatctgcaatatggaactgcactggagttattgatagaacctaccaagataacaggtgtgaaagtgctttgtcccagtaaggggtaaaatagacgtggatcctaactaggttatttatttcagttacctgtcacatggggagactgtgtcaaacctattacgcaaaagttgcccacgtggttaacttttaatgaacacatacattgggcttcacatgtgtcatctcattggatcataatgacaactacatactaagtagtatccattcatttatggactctgcaaagccttattggcacctgctttttctgagaaccatgtgtttatcctacacatacctgtgtgttcactgctgtacacaaatgtaactccctttacataagacccttgctgttggcctgcacgtgggtgtagatagacaaggctcggctttagtgactgagtgttgagactgtggggttcacagtggccccctctggagacttctccacaccatctccaggtccctgcatcacccatgacttttctctttcagacttggccccctccccattcaaggtcttctggacagcctcacagggatcttgaataaagtcctgcctgagttggttcagggcaacgtaagtaggcaaggtggggatcccctgatcctcaggttttagagcttcttgcactaaaacaaagccctgagctaagtgggtccgagtccctcaatttgataagtaacttccattcatcaatctatttgtccattgatccatctgtccatgtttcttctttacatctttccaaatgcattgatgagtctctgctctaggccaggccctgcttgtccacactgaagctgaaatggattggcccctgttctgagaaattggagaagttccctgtccagccttctatggccacagacagtctttcaacctatgcttgggtgtctcctataaccagggcactccactccacttagaatcagatgtgatgtcacagggtgaacactgggcttgttgtgtgatttggggcccttcacaacatccctcatgcctccagtttctcctcaggcatgtgtgaccattgatctgtgggattgcttagaatcactttcacacagaaaaatgacaggaaatttccccagagaacccccactagggattctgctgctccagggtgccactctgcctaactctcctctctgcccctggccaggtgtgccctctggtcaatgaggttctcagaggcttggacatcaccctggtgcatgacattgttagtaagtacctgctttcaagccctctgtccctctctgcaggagcagcaacttcccccaaggagttttttccctgcacaccctaggatactaggtccctctggcctcaactctctctattttgggcttcattttcccccgaataatccagataattttgagatagacaccgtgtctcctgcctcagccctgacactgaggacagctgggctggttggtagaaggaggcctggcttcctccaagcatgctgaacacagtcggatctccagaggcctccattccctggccccccaccttgaggaatatggactccttcacgttgagatcataactgtcgtctgtttttttattgcttgtttgtttgtttagacatgctgatccacggactacagtttgtcatcaaggtctaagccttccaggaaggggctggcctctgctgagctggtaagtgcccttccccacaccccagggttttgggggctggctgttcttctcctggtagaaggcagacgggagcttgggacaatgacatccaaagaaagagacaaacatctacagaggtacacacagggatgcacagagaaatccacagaaaagctgacagaggtggaaggatgcaggcagcacagcaacacagctaccaagagaaacacacacacaaatgcccagacacatggccactgatacagatgcacacactctcacaccagcacactcacacacatgcacacattggtggactcaccacacacagacacacacactctcacccagcaccctcacacatatgcacacatcagtggactcaccacacataagtacacgtggatacacagacacactcactcaaacacatgctcacagagccctgactccaggcctgatggcttgcccagggtctcagcctcctcctgtccctctggggcatgagtttgatgatgagtcaatatcagtaacgctcactgaccttgagtctccatcctgattagggtcttcccccaacagaactatttcttgctgctcaatccatttcctctggcccagcttcccagtgctcacagatggctggcccatgtgctggaagatgacacagttgccttctctccgaggaacctgccccctctcctttcccaccaggcgtgtgtaacatcccatgtgcctcacctaataaaatggctcttcttctgcatcaggggccttgtcatccttcaccattacttgagggctcctgggttggaaacagccctggcctgggtggttgggcccatagcatagagtttggcacttactttgtagatctgaatagtcttgagcaggtcagggagatgttcaagtgtgtgtggatttcagaaggctttcccaggtgtccttagaaagggggaataaggcattcagggtagatataatactccaggtacagttaatgacatacaagtttgccgcaccacgaatgaaaatggcagatttgtgttagggaaatgcaaattagaactacaatgaaggccaggtgccgtgactcccgtctgtaatcccagcactttggaaggccaagacaggcagatcagttaagggcagaagttcaagaccagcctgactgacatggcaaaaccctatctctaccaaaaatacaaaaattagccaggggtggtggtgtgtgcctgtggtcccagctactcgagaggctgaggtgagagaattgtttaagcccaggatgtggaggttgcagtgaggcaagatcatgccactgcattccagtctgggtgacaaagtgagaccctatcaaaaaaaaaattaaatttaatttttagaaacacccagtaaaatgtcatctcacaccagtcagaacagctattattaaaaggtcaaaaaatagcaggtgccaacgaggttgcagagaaaaggaatgcttatactgctggtgggaatgtaaattagctcagccactgtggaaagcagtcaggagattttttaaagaacttaaaacagaactaccattcgacctggcaatcccattactgggtgtatacccaaaggaatataaatccttctaccaaaaagacacacacacattcattgcagcaccattcacaatagcaaagacatagaatcaacctagatgcccatcagtgatggactggataaagaaaatatggtacatatacaccatggaatactacacagttgttaaaaaatgagatcatggcctttgcagcaacatggatgcagctggaggcaattatcctaagtgaatcaatgaaggaacagaaaatcaagtctctcgtgttctcacttacaagtgagagctaaacattgagtacacatggacacaaagaaggaagtaatacacaccagacctatctgagggtagaaggtgggaggagagtggggactgaaaaactacctatgggtactatgctgattatctggatgacacaattatctgtacaacaaacagtttacccaggtaacatgtaccccttgaacctaaaataaaagttggaaagaaaagaagaaaatggcagatttaagagatgttcaggaggtagatctggaaggatgtggacaagggcgtaggtgaggtgcgtgtccagtgtcaggctgaggagccaagggtacctggggatctgggaggatgaactgattccgacagacaaagtatgcccttagctgtggctactctgtgtggaaatgcctgggacacccggaggatccatccaggaagctgatggtacacaagtcacctaccgcccatcttttgcttccttgcatgcagtcatactgacctcttgtcaattctctaagtaagaggaggacaaaaaatgaccaaggacgaaatgaaaaggacaaactggtgcaaagtgttcactgctgggggtttgagaaagatacaactagagttgtaagtaagcagcagcttcttgatatcctgggttggagtcatattgttggaggaagaagcctgagtttcaggtactgagaagaggaggggaggtaaggaagttgagtctgtgtatgcagataagatttatgaggccaggctcagtggctcatgcctgtaatcctagcactttgggaagccgaagtgggtgagtggcttgagctcaggagtttgagatcagcctgggcaacatagggagatctcatctctacaaaaaaaaaaaaaaagatatatatatagagagaaagaaaaattagccaggtatggtgacatgtgactgtagtcccagctacttgagaggttgcggcaggacgatcgcttgagccatggaggtcaagggtgaaataagccatgttcacgccactgcactccagtctgggtgacaaagcaagaccctgtctcaaaaaaaaagaaaaaagaaagaaaaagaaagaaaagaaaagatttatgaaatactggctgtgagaaggaaaaagaatggggctacccagactgaagaactctgaccccccctcaaataaaaaatacatacactctcattgttgaggtctttagggactagtccaaccctttcattacacagatgagatactgaggccttggggttgtgtgaatgacttgcccaaggccacagggagacaaaagggccaatgaaagactggaaacatcccagactttacagaaaaccatgtcccttgctctttggagaccttgttgagctcgtgagaatgagcagattccagttcatgtttctcaaatctctgattctaaactggggacctacccattccccaacccctgtcagacatcaatcatcaagtccagacctgccactatctccacctactgttgcctccaatcaacatggcatcatagaaggacagttgcatagctcagacttcgagatttgttgtgtgacaccatcatgtgtcttcagggagaatttaagaaagaaagcatattccacacccacaaaagttctctgagctcagatgagtaattaactcccagcaagcagctgaatgagccttggaaatgtccacctaggcactgaccggaaatgcagaaggaccttccagataggaagccagcaactggggcctgctcgtgctagagaggctccaagaataagctaccttcaggtcctctcagggcaggcactggatcagcactgagagttccctgtgtctgaggccccaagaactgagatggatggagcccagggacacacatctagaaccatcagtgctgggcctgctgccctctggccattgtactgaaccgtgttcctgcctcacacccatcccctggccatctctggatatgattttccccctgctcccctggacttcttcctatagcccacagaagggtcctcccctctctgacaagttcaatttctaattagctaatctagaattcccctggatacaagacatcctgccaggtggccaggctagtcaaaaacatttatgctatttaaagagtggaaacacatttttaaaactctctgggattatgtcagtgaaagtggcaaaggaaaggtctctgaaaattttttcctacgtaaaagcaatgagaaaactgacagaaatggtcttaactaacattttcagagctctggaaattaaccaaagcttgtagcaatctggggagagtttattcaatacaaattatggagtctcagcaagaacagagagctttgtggcattttaacctctcccatctccccatactcccgctccacagccaactcgaaaacgaaaagcccacaatctttgtgagaaccagcagcccagtagacactggagaggtgaggagggagttagagcaactcattcgcagagaattgtcattgtttgaccggcccattggtttcccaggaagacccattctcatgattgtcattacttgacctgacgcagagctcccctggtctgaacaaccttttccccaaatacatttgtcaaaaaataaccagaggcaactatttaacaccacagctgcctgaggggatgtaatatttggggcaaacaaaaaactaaccaaaaagctgacaaggaaaagctggggaataagatatctatatgagctttgaaaatctccaacatactcctagggctctaggagggcatgtgcttacagggagctgtgtttatgtaaggagtaaagattaaggcagaattgtgttaaataaaaattagaaaaggccactgttttgaactgagctcctgcactaggcccaacagaccagaccaaaccagaatggagccactcaggcatgggatcatgtaatcaaactaaactttagtaacaggccagttttccaaccaaccagagggggccaagtctacctgagccagagggtaagaaagttccctcttccttaaccctataaggaaagtaactttgagatgatcaatctattttttgtcccctgtttcttcttcttttatacctataaaacccacctctgctcagcccacaggagctcacaggagcctttctaaatctttagatgggatgctgcccaacttgctaatctctaagaaaagcccattagaacatatccctatgtttaaggtaagctttgtgaacagggtattcagtacctgtggatctcaacccgcactgagggtcactctcctactggggcccccatcagattggcaatatgtcacatgtggactattcatgcctggagggaaagctccaaatacacgggtgacaggtccacaatgtttcaaatccccacctacggctgccactgctaatcttcaccagtgtgttgtcaatctaggcactactaggtactctaatgaaacaaaaaggggaaagatttgtttccccatcctctaccctcttctcatactttgtggctggaggtgtgtctgtctattaatcggggtgctggctggctgtccaggtattacaacccaggctgtgtgtccccatcctgagactacctctgtggacacccattgcccttcctgcttgacccagaactttcagcctcaattgtccagtccaggaagggagatcatgtactgcacaaatttaacaggtctgataatgttgcccacctgagtagaaggatcagatgtccctggagccactaatgggaccctaacatcctggaactctttggtctcatccactacccctgtggagtcccataaaagagaggtgcccaggggaagcatcaccaccagattagagttagggggccccatctggggtattatgacagcctgaaccacaaactaccccagagacgtgcactccttagggaaaaagaaaaaaagaatggttgagaacacggagattggaatttcacaggcacagcctaatcaagcactgtccagtccatgtccacctcaagccccaccaagttcagtgtttcccagcatgtgctgcagtatttactgtgcatcctgccctaatcaggcaagggtaccagcccattagcagaccaccttaatgtcctttcttcagttgctacttgagttaaccgctccatcattcattggctccattggcccgcaggtgatatgagtgcaaactcacattccatgagtttgagctcattgttgtgttgcttgggcagtaaaatatattctttggtcagagtaaagtcccacaggtatccaaaaacatgacatagttctttttaagagcatctatggtagtttcagagttcacatggtggtctagaatggtaataccacagcctgagtaggtgtcaatggcaatgaggacatgagtgcccatggcaggaggccagaggcctgttgtggtcaatctgccacaccagggcagtttctagccctcagttaatgtatcccaattcctctctttgaacaatttgtgccccttagcaagaatcacaaggttgtactgtgtccctagtctcggcatcttccaggatgctcgttcttgcatctgaggcggatgtcttagtccattttgtgttgctataaggaaatacctgaggctgggtactttctaaagaaaagaggtttatctggctcacagttctgcaggctgtacaagaagcacgctgccagcatctgctcagcttctggagaggtcttttgtgtggtgacacaacttggcagagaaggccatagaggaagcaggcacatgctgagaagggccaaactcaaggggtgtcctgactttataacaaccctctcccgtgggtgctaatacatcctcccagaaccaatccagtcttgtgagagcaagaactccatcactaccaggagaatgacactaagtcatcagtgagagatccacccccatgacccaaacacctcccactgggccccacctcccaacaccatcacttctggcgatcaaacaaatgatatccaaaccatagcggtggactttcagttgtcgattgttgctggctgtggggcacaagcttaactggcacaagacttctgtccacattccattttaaaaggtcctttgctatgatcatccacaggagtgacaaacatttgtctccttccaggcagcaagctgctgtcatagtttttgttcccacacaggggattctgtgatggttcagtcactcagttaccattctcctgaccagatggctaggctgttggcaatggcccttgagtcagtgaaaatgtaacaagatatggtggtagaatggcccccacagctgtcatcactgcacataattcagctcattaggcagaatgtccaattccaatcccagccaaaagatggccatctgctggctgaggggcagctgcagcccagtggaccccatttgcctttagttttgcagagccatcagtaaaccaggtcatatagtcagtagacacatctttgaatcttgggtcccaggtagccacaggagggttcagagcatctccctgtgggttgcttggtgcttctgggaagctggctatttgttcatggagtctacttgtcctagttgacttggatgtaccatttccatttaatgattgagctctgttgagcttgtccggttttattggtgggatttgtaagcaccccagtacaggttacagcatcacaggtggcactcctgccataaaatgctcagtctcctctagtgcccaatagcaagcaaggagttgcccttcaaagggggtgtatctggtggccaccacaggcaagtcatgtgtccaatagccaagaggctggtgcacgccagtggcagtttcctgttgccacagattccaatcagcatgcttggcggtcatggacgcacggagtcccattgagctagcaggttccaaaggtcccaaaggcagtacctgagccatgacttgttgaactacttccaagtcctgctgctgcaaggggccccattcaaaactggtggttttgtgggtcaccttgacgaggaaggccaaaagagcacccagacagggcatatgctgtctcctgtatacaaataggcctatcagctaatgggcctcctgtttattagtggatgtcactagggccaacaattgtactggggatacttttttggtttcctatacaaatgacccctgggacatgcacttattgtgctgagtcctggactttatctggatttatagtccagccaacaccagttattgtatcaatggcctgtttttcagtaggccctactatcaggatatcatttatgcaatggatgactaaatcttctatgaggacttgggcttgttgagggtcaagccccacccactggtggcatatggcaggggaattgaggtatccctgaggaagaatagtgaaagtattatgcaggcagttccttgtgaatgcaaattggtcacaaggggattgagtaaaagcactaaccaagttaataacagcacgctaatctccagtaagggttcccactgcctcagtgacagtgatgacatctgacacctcatgggcccagggcaaaccccaacattcagcctgcattccgtctaccatcagccaccataccctggaggcttttcaatcagccagactgagctgttacattgacagggtagtttgtaacattcctacagaagcgcatcccaaattcacagagtaatatcctcttctccacttggtatgcagtactgtatttgtggaataacctactgaggcttggagaatttaagtggcaggtagagtggacacacctcactgttacggctcaaattctcagctgtgagggggaatatcccctcaggcagtggtgatgttctgtgctacaagcagccaaaatatcaatgcccgtaatgcactcgacacaaggaaccatggtcaccagcactcaaaatggctcaaagagcctcactcgcaagcacataagtaccacaagcaggtaagcaccatggatcaccatgttaacccccaaaccatccaatgacatcagtttaatttttcccctaaggaaatccagaaatattgtcatatgggaacgagtatccacgagccccagaaaagtctgaatctctttcttttcccatttatcttgacaggggtataagatcattggtctccagtgggaagccaggagccttggccccattcctaactgtgccattcaacctgagacatttgagtctgcaatatccctttatcaaacaaacacaccatccgggctgtattagactttctggcttttgtccacattttcccttttattgtcagatatcctcttcagagaatgacctcatttcaatagtctagttttcagcaatgccttctgttgttcagcactttttggaaacaggccttacttgaggcctgcaagcaacctggaccaggcaggattccctgcacagggccccccattccccccagacatcatctgtggtccctgggacaccatgggagttgacattatgttccatttatccctgggcagcgagcacctcagtcagtctatgacccctcagaggagctggtaccaccttgggcaatggggctgacaagcccttgcctttccaccatgtgatggtctatttccttggcaaccctgcacactatgtcaaactgttaagctgaacgtcctgcaccagtgaccagtcccaggggagaggaacaccatgcacaggttaccaaccctaggagagggctccaaacacttctgcccattttatcttggtatgggagtcaccaaggaaaatataacactttacttatgtagagaagagacaaagcaaaatcagcttcaatcgtatgcatttgtcccccatgccagcagatccccccaatagccagtgcaaggcaattggctatggacacccctctcatgccacggatggactctgacccctctcctgtggagttagaaataccaaaagctgggggcatatctgagggccattgacatatacacttaagcagaacaaaggggcacacattgaatctaaaacagggaaatatattcccatgcagggcctggaacaggccacgtgagccctttatctcttggtaaggaagtgttccaagcccaagacctgttcttatatgactgagtgggagtcgaaaggctgcatgcatgagactggttttcccaacacaatcattagctgaccagtaagctaactaagcagacacagcagtagccacacatgacaaagaatacagactttacagaatttgttcagaaaaatcagtaaacaaacaactacaagaacaagtaacaaccaaaaactctggagtggagggagaatccaatttctgaaactgccatgttatattatttaaaataccagtgttcaacaacaataaaaaaatgagatacgcaaagaaagaagtatgacttcccaagtatgacagccatagaagctatctctgaagaatctcagacgttgaacttactagaaaaagactttaaatcagcaaatttaaaatgtgttcaaagaacatatgtctaagaaaccatggcttagaactaaaggaaaatatcagaatgatgtctcacaaataaagaatatcagtaaaattacagaaattgttttaaagaaccaaataaaaaactgaagtttagaagcataataacaaataaaaaattcactagagaggctaaccagcagattttagcaagctgaataaacagaaaactttttttttttttttttttgagatggagtctcactctgtcgcccaggctggagtgcagtggtgcgatcttggctcactgcaagctccgcctcccgggttcatgccatgctcctgcctcagcctaccaagtagctgggactacaggcgcccgccatcaagcccggctaattttgttgtattttttttttagtagagagggggtttcaccatgttagccaggatggtcccgatctcctgacctcgtgatctgcctgcctcggcctcccagagtgctgggattacaggtgtgagccactgcgcccggcccagaaaacttgttttaattttttattttaatttttgtaggtacatagtaggtactatatgtctacatgtagtatatatagtatatacatatatatactacacacacacacacacacatatatatatttatatgtatatatatggtacatgaaatcagttttggttttttgttttttgtttttttgatatggagtctctctctgtcacccacgttggagtgcagtggcacagtctcagttcactgcaacctccacatcccaggttcaagcaattctcctgcttcagcctccctagtagctaggactataggtatgcgccaccacacctggctaattttttgcatttttagtagagacgaggtttcaccatgttggccaggctgttctcaaacagctgacctcaggtggtccgcccacctcagcctcccaaagtaatgggattacaggcatgagccaccaagcccagccatggaatgttttaatacaggcacacaatgcttaataaccacatcatataaaatggggtatccatcccctcaaggatttatcctttgtgttacaaacaatctaattatactcttttagttatttttaaatgtataattaaattattattgactatcgtcaacctgttatgctatcaaatgctgggtcttattcattcttttgaactattttttggtcctcattaaccatccccacctgcccccatccttgcattacccttcctagcctctggtaaccatcctgctgctctctatgtccatgaatttgttttgatttttagatcccacaaatcagtgagaatacacaatgtttgtctttctgttcctggcttacttcacttagcataatgacctttagtttcatccatgcttttgcaaatgacaggatctcatcctttttatggatgaatagtactccattgtgaataagtaccattgtgaataatatccattcatctgttgatggaaacttaggttgcttctaaattttggctattatgaacagtgctgtgacaaatttgagagtgcaggtgtctctccaacatagtgagaatcagaaaacttgaaggttaatcaattggggttatctagtctgaggaacagaaattaaaaaatagaatgaagaaaataaaaacagagtgtcaaaaggctgtggccaccataagcatgctaacatacatatcataggaattccagaacaagaggagatagagatggggatggagggagaacatttgaaaaaaaattactgggccaggtatggcggttcacacctgtaatcccagaactttgggaggccgtgtgggtggatcatgtgaggtcaggcattcaagaccagcctggccaacatggtgaaaccttgcctctactaaaaaaatagccaggcatggtggtgcatacctgtagtcccagctactagggaggttgaggcatgagaataacttggacccaggaggcagaggatgcagtgagccaagatcacatcactgtattccagcctgagtgacagagcgagactctgtctccaaacaaaaagaaagaaataaagaaagagtagctgaaatttccgcaaattttatgaaaaacattaatctacacatccaagaagttcaacaaaatccaagtaggataaattcaaagagatctacatttagacatatagtaatcaaattgtcaagagacaaagacagaaagaatcttaaaagcagcaagagagaagtgactcaccaagtacattaaaccctcaataagattaacagttgatttcttatcagaaacaacggtgttaagaaggcagttgaataacattcaaagttctgaaagaaaaaaaaagactgccaacaaagaattctccatccagaaaaactaatattcaaaaatgaaggaaaaattaagagattcctacatcaacaaaaactgagagaatctgacactagtaaacatggcttaaaggaagtccttcaggctgaaatgaaagtgtactagtcaacaatttaaatctaaaggaggaagtaaagaacatcagtaccaataactacatagttaaatataaaagacaatataaatgtattttttgtttgtaactctttttgttcacctgactaaaagacaactatataaagcaatacttagatgtgtcaatgagcatacaaatgtataaatatgtaatttgtatggcaataccagcataaagaaaaggggtgacagaggtatacaggaacaaaattcctatatactattgaaattaaattcacattaattgaaatagactgttctacgttaattataattcctagggcaactattgagaaaataactaaaaatatatagtgaaagaaatgacaagagaattaaatgggacactagaaaatatctatttagataacaagaagtaataattgaggcatagagctacatataagacataaaacatataaaaaacaaatagcaaaatgctatgagtaaatcctattcttttctatcagtaatttaattaaatgtaaatggattaaacttgccaattgaaaccagagattggcagaatggattttaaaaacataatccagttatattctttctacaagagacacattttagtgtcaaagataaaaacagattgaaagtaaaagaatgaaaaaaaaggtatgccatgcagtgaccaaagaaggctggagcggctatactaacatcagataaaatagactttatgacaaacacggttacgtgatacaaagaacatttataacgataaaggggtcaatccctcaagaagatataacaagtataaacatgtatgcaactaacaagagagccccaaaatacatgaaaccaaaattgtcaaaattgaaggaaaaaattaaaaattcaacaaaaatagcaagaaacttaaacacacaattttcaacaatagaacaactagacagagggtcaacaggaaatggaagatttgaacaggtctacaaaaccacctagagctaacagacatctatagaacattttttccaacaatagcagaatgtacattcttgccaagcacacatggagcgttctcctatcagaatagaacatatgttaggtcataaaacagtttcaatacctctaaaaagatggcaatcatacaaagtgtgttatctgaccacaatggaatgaaattagaaattaataacagaaggaaatttggtaaatttacaaatatatggagattaaaaacactgttggctgagccagctttaaagatgggctggatacaatatgtgactatcagtttcagacttctgtaatagaaagcatcctagctggattgctaagcatgagatgaagttcttggtcaggtgcagtggctcatgcctataattccaacactttgggaggccaaggcagaggttacctgcaaaggaagcaaaaccaggttggccccaggtttttttcctacaggatattagaagacaagagttctcaatggagatgggaagaaggctgagagtaaaggattcagatcagcagtgttttcatattgcttatgaaagtaataaacaagaataagctatcaagttaagtgttcaaggaatcaaaaatgatcctacacatctgtccatttttaaaaagcaagcaactgggaaatgagtctaacttaacttgtgataggaagagacacagaataaaaatgatcaatgatggttttgggaaccagttaaaacctaacatattttaaaactccctaaatttgggacactactacatgcctaattggatgacccaaaaaaagaaaaagaaacctgacaattctgagtgatggtgaaaacacagagccagtgaaactctcatacattcctggtgggaatgaaaaacagtatggcccctctggaagacggtatggtagtttcttaaaatgttaagccgataagaggcagacacaccaatatctccccttggaggccatggaaaatgagtcatggactcaggtcatgtggcagcagctccactatcacctcgcccagcttcccgagggtcagcctagggcccagctccgcagaagatcacagcccctgcatggcactgcagccaccataggcctctgcccagcaaccatggatcccacagccatagcatagcaaaaaccaaagaacaccccagcattccaaatggaacccagctattaactggaagcctggattggtctcttttatggtcagttagaaaagaaaatttaggtcaggcgcagtggctcatgcctgtaatcccagcattttgggaggccaaggcgggtggatcacctgaggtcaggagttcgagaccagcctggccaacatggtgaaatcacgtctttactaaaaatacaaaaattagccaggcgtggtggtgggcacctgtaatcccagctactcgggaggctgaggcagaagaatcgcttgaactcaggaagcggaattcctcagttgcagtgagctgaaatcacaccattgcactccagcctgggtgacaacagtgaaactttgtctcaaaaaaaaaaaaaaaaaaaggaaaggaaaggaaagaagaaaatttataaataaaatatgttttgtccattactgctaatgatcattcttcttttcctttctcactgtttttgtaactatataaaattaaaatgtagtaaaatgtgcacatgttaaatgcatggctttatagagttttaaactttatattccttatagtataccacagccttatcaatatatagatcatgtctattaacacataaaatatttccttgtggccaggtgctgtggcgcatgcttgcagtcccagcgctttgggaggccgaggtgggcaggtcacttgaggtcaggagttcaagaccagcctggccaacatggcaaaaccccatcactgctaaaaatacaaaaattagccaagcatggtggcaaacacctgtagtcccagctactcgggaggctgaggcacaagaatcacttgaacctgggaggcagacgctgcagtgagctgagattgcaccactgcactccagcctgggtgacacagtgagactctgtcacaaagaaaacaaaaaaaaactccttgtaacgttttaaccaatacccactcactctaccatatgcagcccctgttttgatttctagtaacatacattattttagccatttcttcaacttcataaaaattaatcacaatgtatacttggaaaaaaatgttaaacatacacttaacatatgacccagcaaccctacttctagatttttaggctagaggaatgaaatatgctcacaacaaaacctgttccttcatgtttggggatttttttttggcggcggggggcggggggggggcatttggttttgcgtgtgtgtgtcagagtctcattctgttgcccaggctagagtgcagtggcatgatcttggctcactgcaacctccgcctcccaggttcaagtgattctcatgcctcagcctcccgagtagctggaattacagatgcacgtgaccatagccagctacttcttctgtatttttagtagagacagggtttcactatgttggccaggctggtcttaaactcctgacctcaagtgatctacccaccttggcctcctaaagtgctgggattacaagcgtgagccaatgcgcctggccgtgttccttaatgtttatagcaaatttgttcataatatcccaaaactggaaacaacccaaatgcctttcattaggtgaataaacaaacttcagtacatctataccacagaatactactgggcaatgaagaggaacagatattggtttacacaacaacttgaatgaagttaggaagaggatccgaattctcattgtctgcctgagggatgatttgataggtatcaaaggtcaagacatgccattataaagcaggaagaagatatgaatttttatttgtttaaagctcaagtttgtgatgcagataaattctgaaaaatataaaaggaataaaaacccaggaaactcacttatagatcattcatactttaaattatgacttccttcccaatgtccctgccactattgttttcagaaccctcagagagctttctcattcactgtgtccagggtttttgtttcattcagtaggaaatacagagtggaacggcttactccatccatttccactctcccgtttgtaaaacgagctggattacggcagatgagggtggacctccagaaatttaacacagtgcgttgactgttgtagtatctttactggaacagcccaatgcagccttaggtacttactatggagcttttaatctggaaaatgtgttcttttcaatactcaaggtaacaagctcagaagcaaatggcactcacttgggataaataacggtacacactcagtcttgcccctgctctctcttgttcttaaaacaagttatccatggctgggcacagtggctctcacctgtaatcccagcactttgggaggctgaggtgggttgatcgctttgagctcaggagtttgagaccagcctgggcaacataatgaaacctcgtctctactgaaaatacaaaaattagctgggcgtggtcctagctactcaggaagctgaggcatgagaattgcttgaacccaggaggcggagtttgcagtgagccaagattgcaccactgcactccagcctaggtgacagagtgagaccctgtctcaaaaaaaaaaaaaaaaaaaaaaaaaaaaagctatccatttgtaaattgctgatttctttagggcattggctccataaacttttcataaagcctcaatgatttcaccattcacccatccaagtttcaccataaatttgatgtgtattcttgcttcaattttagcaggattcatgtggctttgatagggtttttttctaagtgatgtcttatccttcttattgcctcaaactagatcccgttcaacatgttataacaaattagttcaagtttattttggtgcaaaaagaatttggaaatgcaggcatagtttcttcataatatgcattttccataagcttttcggagaccttcataggataagagatctattgtagagatttgatcttacagaaccatgggagtgggttaaatagtccttgttaggctgttgttttgcatctggtgctggagcttcaacccagcagggcgggtagacaggaagaggagatggatatgaagtgaggaagaacaaagaaaaactgaaacctgatttagggtctctgcacctccaagtccacagatgcaggggcacaaggaaggtttcctgctccttcagtgaacacatttgagagtctgggcgtttggtaaggccatggaatagaagccagagactgggtgctagtccagacactgcccccactgtgtgtgaccctgaatgcaaagtagccaagaccagtcacaatcccacagccctcttttttttttttttgcttgaaacggagtcttgctctgttgcccaggctagagtgcagtagcgcaatcttggctcactgcaagctccacctcctgggttcacgccattctcctgcctcagcctcctgagtagctgggactacaggcacccgccaccacacccagctaattttttgtatttttagcagagacggggtttcaccgtgttagccaggatggtctcgatctcctgacctcgtgatctgcccgcctcggcttcccaaagttctgattcccacagccctcttgagtatgaacagcagtgcaaccgcagaactcactgcacaacatcctcctctttggggctcagtcttccaaggtaagaaatgggaagcttttagctgttgagtctttgcttcagatgaaactctgtccccaggaagatcaccacttgacgtatgctaaagctaaacgtagctcccttagtttctcccttgtattagttatctatcactaatacataacaaagtatcccaaaacttcatggcttaaaataacatgtattatctcataggtattaccctcatgtttctgtgggtcaggaatatagaaactgcttagctgggtggctctggctcttgcgaggctggagtcaggatgtttgccacgatcatccaaaggcttgactagagccccagagaatacaagagggttcatacacatggctgtggctggagaattctcagttcctggccaccagaatatccgcactgggctgcttgagtgtcctcacaacatggcagctggcttccccaaaacacgtgatccaagagagcaagagagagaaagaagaaagctgcagtacctctttttgacctcacctcagaagtcacacaccatcactttgggccataacctattcactagaagtgagtaaatccaccccacatgcaaggaaaggagaatgaggctctccctcttaagagggagcatcaaaggattgtggatatattataaacaactatactcccttccattccggaagttaccctgggcatttccttcaatggccaaagtcccaggagcaggctttcttaaataaatgagtctttcctccttaggtaaattcttcaatctctcttgaaagtgcaaatggctatagtccggtgtttttgttttctattcttgttttgattattcatttaatggtaatttttccttcctgcttcattcagaccagataaaaacagaaatactctagtggaagtgggggtgaggggcacagtttcaacatctctgccatctgtcgtgtctcctccagtgttggcaggcatgcgatgactttagatggttccgagatacagcatgaaacaaccttgagtcactaaggggaaatgtttctgttccttttgtaatttttctttccttattctgattgcaacaaggaaagagtgtcagttgggagctagcctgtcttgaatgctctgggtgatgctgccgcaatctcttttttatgaaagagaaaggagaagagggagagagagagagagagagagagagagagagagagagagtgagagagctggactccagttcttctcaccacattatccaggaaaacttaataacgtttttctcttccgtttgcatctacttagcagttaccctgtatttcaggaagttgatggtgaaacttaaaatatgtaaaagttcctgttatattataatagatttctttaaaaataggaagacacccaaaaggaaaatattaagtaaataaaagtaatggttgcctgtatatggcacaagtcgcagaggtgatatgtgaatgactggaattcggggagcttagggaccatgcctccaatgcctgaccagcctggctactggatttcctgaagccaagctctccaggcccctaaccttgcaccagcgctcacactgtatgtcctgtggccactagaggaagctgttgcacatatatgtacttcccagctaccaccctgggaatgaacactaacatctatgtagcagtaactcctttaaggattgcatctaatcttcccagagacggggtctctaaggcccaaagtcacagagcttgtgagcagctgatccagaatccaaatcccagcagtcagactctggagctcaggctatttgtcataggttgaaaactcatgagctccagccaaatccgatgcattgttatttttttagattttgctttgaatgcttgattgttctccagctggatgctaaatacaaatgcattcatcatatcccccaactagcataccaagttgtcttacattattaactgtttagctcctaaagcagattttcagatttaccagtaaaaatacaggatacccagtgaaatttacatttcaaatcaacgacaaataatttctagtgtaagtatgtcccaaatatttcatgggacatacttacactaaaaaaattttcatcatatatctgaaatttaaatataactgggctttctatattttacctgtcaaccttactgatatggtttggctgtgtccctatccaaatctcatctctgtagttcccataatccccacagatcatgggaggcaccaggtggagataattgaatcatgggggcagttttccccatcctgttcttgtgatagcaagttagttctcatgagagctgatggttttctaaggggcttcccccttcactgggcactcattctctctcctgccaccttgtgaagaggtgccttctgccatgattgtaagttttctgaggcctccccagctgtgcagaaccatgagtcaattaaacctctttctttataaattacccagtcttgggtgtttcttcatagcaacgtgagaacttacgcttactctaaaagcatctttgcatttgaaactcctgctctgtccctcattcccccacagaggggaatatttatagagaatctactatgtgctggttttgagtgggacgcagagaaacaaaaggctctgcagcaggctgcaaacagccctgatgcttcagctatgtggtggtcaggcagaccccccaccgccccgccatggtactgaaactctctgggatctataaagatgccatgtggactttctggcgagccccagtgagggagtcacagactgctagatttctggagcaaagccatgctgccttcagcagggaactgtataccatgagtaaaacagcttctgacatgctacagggccctggtcaggaaggggcgcctgatcacagggcatcagtaaccatgaggccagaactgcccatcaggaactggtcactgtcatccaccaagtcatcaggtcagcaggaccaacagcaattcttcatcaggcagaagtggtgtctgatctagtgggggctcaaaaaggtccagggggcaaaagtaagctacccagaccttcgcatcacctactagtgttgcacccagcttctccctgggtgcacacccatggccccatagatgttcccgaggatcagctgatggagaaggaaaaattctaaacttgattcatgagtaggtcagctcagtatgttagaggaagccaaaaatcgacgatgtttcacaccctcaggagtgaccctgaaagacagcaacccgaggaaatccccccaggagtaaagcttcaggctgtgcacttgctcatccactttgacaaaaaaacaactggaggtaagatttataggccaggtgcagtgactcatacctataatcccagcactttgggaggccaaggtgggagatcacttgagcccaggggtttgagaccaacctgggcaacatgacaaaaccctctctctacaaaatatgaaaaatgagccaggcgaggtggtgtatgcctgtagtcccagctactcgggaggctgaggtgggagaatcacttgagcctgggaagtggaagctgtagtgggtcatgattatgcactagacttcagcctgggtgacagagagatgctgtctcaaaaaaaaaatttacagacacttgggctggggaaaatggtttaattgtttagtcagggacctggaagaaacaagattggaagactggggacaccaaggctgatctagtaactgccagtgagtgtgtgacctgtcaaccacagacaaacactgacctcctgctatggtaccatccattcaagagctcaaccagccagtttgtggcaagttgactacaacagaccccttcagtcctggaaaaggcattgattcaccctgactaggactggcatatattttcagaatgggtttgcctttcccacctgctaagcctaaactgccatcactaaacaaaggctggcagaatgtctgattcactgacaccaggtcccacacatcatcaccttggaccaatggagccatttcagcaaaggcattgtgaagtgggcacatggttgtgagatccactggttttactatgtatcacaccatccagaagctgccagcctggtagaatgatgggaaggctcttgaagaggcacaatcttgtgggcgatacactgcaaggatgcagtatggtactgtctactgctgtgtaacaaattatcccaaactcaggactctaaaataataaacatgtgttatttaatggtttttttgaatcaggaatttgggagctgctggactgggcattctggctctgagtctgttatgaggttgcagttgagttgttggctggcgctgcagtttcatctgaaggctcgactgagtgaacatgctttcaagtttactcaagtggttgttggttttcctcagttcctcaccggccattgatcagaggcctctttcctcaccacgtgagcctctccacaggtggcgttgtcctaatagtatggcgactggctttccctagagtatgtgatccaagagctcaacatggaacccacagtcttataacctaagtctcagaaatgacatagcacaacttctgccatattctattggtcacacagaccaccctagtacagggtgagaggggacaacacaagggtgtggataccaggaggtggggaattggaggccaacttgcaggctggcttccatgggcatcatcccttaggatgtgatacacaccttaaaccctaggctattttatgatgctgggtgctcactacatagaatgcattggtctagaaatcaagtacaagtatctcccattcaacatcacttccagtgacacacatggagactttgaactttccattcccaaaactttagtctctgtgagtctagagtctctggttcccagagtgggaaggatcctttctctagggaactcaatgaggatctcgctaaacttcaagctaccactgtcattgggttgctttggacttttcatgccagtagaccagcagatgaagaaaggagttttcatgactgcaggggtaataaaccctggggacgcaggtggctggggaaaagcaggaatgtgtttgaaactcaggtcaaccatggggtgactcccatagtcccatgcccagctttgactctaaagagacaaggataataaccacagcttgataaaggcttgatgaccagggtgctcagatccttcagacatgaggtcccgatcaccccaccaagacaagccacctggacaacaggatcgctgaggatgaggacaatttggaacacatagtagaggagggagactgtgagtatctgctgcagcctcatcatcaattgcagcatcagagactcttgttggtcttgcaagtttcccgtgaattatgactggattagtccacataggctgccataacaaaataccagagactgggtggtttagacaacagaaatttattttctcactgttttggagactggaagtccaagatcaaggtgccagcaggactgattgcccctgagacctctcctctttggcttgcagatggccactgctatggtttgaatatgtccccctgccccaccaaaattcatgtgttgaaacttaatagccaatgttatagtattaacaagtgaggttcttaagaggtgattaggttatgaaggctcctctttcatgaatgggatcaagtgcccatataaaagagcctgatggagaaagcccctttttgcccttctgccttccaccacatgagcacatagtgttccttcactcaagaggacacagcactcaaggcgccatcttggaagcagagaccagccctcaccacataatgaacctgctggtaccttaatcttggacttcctggcacccagaactgtgagaaatggatttctgatcttgataaattacctagtctcaggtaatgttataatgttatagcagcacaaatggactaaaacaactgccctcttgctgcctcttcacatggccataccttgtggctctctgtgtgtcctaacctcctcttctcataaggacactagtcagattaaattaaggcccgccctaaggccaggcgcggtggctcatgcttgtaatcccagcactttgggaggccgaggcagtaggatcacttgaggtcaggggctcaagaccagcctgggcaacatggtgaaacccccatctctacaaaaaatacaaaaattaaccaggtgtgatgtcatgtgtctgtagtcctagctactcgggaggctgatgtaagagaatctcttgagtccaggaggctgaggctgcaatgagctgtgttcatgccgctgcactccagcctgggtgacaaagtgagaccctctctcaaaaaataaaataaaataagggtggccctaacggcctcagtttaacttgatcagctctttaacagcccctatgtccaaatacagtcccattctgagatactgggagttagggttcaacatatgaatttgggagatacaattcagtccataacagtgaccaagcagaatcctggagcacctgtgcctgaacagagtgaatttgatgtgtaagaggtggactgtagacaccggcattgccctacagatcccctgcactgggcgctaacccccagctgctgtcagtgagggctaacaacccacagcttcctccctctctagggaagtgccctcaactgacaggagggcacctctaagttaggctcatccccttaagggacagcccacagccaatgactgactaagagtgaagaaggctatctcccttgctgcaagatggaggaactctgttgtgggctatccatgccagagcccccagtaccagacgtccctgagaccacatgttgctctgctcctccaccaccccatcctgcttccttccctcccttataacttttcccagaagagcactcccccagtaaatcgcattccccaggatccccattccaggctccacctctcaggaacatgatccaaaacaggtatgagcaggcagttcacagaaaagaaaacctgaatgcccaatcatcataagcaaaagtgctcagacatatctgtaatctaagaaatctggccaggcacggtggctcacgcctgtaatcccaacaatttgtgaggctgaggtgggcagaccacttgaggtcaggagttcgagaacagcctggccaacatggtgaaactccttctctactaaaaatacaaaaattagccaggcatggtggtgcatgcctgtaatcccagctactcaggaggctgaggcaagagatttgcttgaacccgggaggcagagattgcagtgagctgagattgtgccactgcaactccagcctgggtgacagagagatacttcgtctcaaaaaaaaaaaaaaaagaaaagaaatccaaagcaaggcagggtggttggctcacacctgtaatcccagcactttgggaggccaagaaaggaggattgcttgagcccaagagttcaagaccagcctgggcaacatagcaagaccccatctcactaaaaattttaaaaaattagccaggcatggtggccacatgcctgtggtcccaggtattcaggaggctgaggtgagaggatcgtttgagtccaggaggtcaaggctgcagtgagctgtgattgtgccactgcactccagcctgggcaacagagcaagacctgtctcaaaaaaagaaaaagaagagaaaagaaaaagaaagaaattcaaagtatgtcaataaatttgactattaatgttacacattagccatgggcgcaggcactctcagggcttatcaatagaaatagtcaccagggatggcagtttgccagtatctaaaactaaaacatgagtgaccttaaacccagcaaccccacacccaggaactcaccctgacacgtgcccaaggctgacagagaaataggaaacccctttacagaactggcaatcagagctgcagttgaaatagcggaaggtatcgctggggcaccaaggaggaagtgatttcatgtgagcaaggtgctcattattggagacaagggggaaagtgatggtatgatacagcctgtgaaatgaaatattaaaactatatgtgccaatatgggaaaacttccaaaacatgttcatgagtgagacggggaacaaggtgcaaaacctaatatccagtttgatcctccaacaatgactgtaaaaggacaagtcctttctggaaggacaggcaagaaagggtttacagtgattaaactacagggagcagaaagggctggggtaaggagcttgtatgtcttgcttcactcattatccttctgcactggtagaattttcatcctgtccatgaatcacttttccccaaacattttattataaaaatattcatacatgcagaaaatttaaaataattgtatagtaagcacccatatacccactaactagattctataattaatattttgctatacttgccttatatatctgcctatctatccatccttccatccagccttccatctaaccatcttacttttcgacgcatttcaagtaaattaaagaagtggcaatttactttatccctaaatatttcaggatgctggccaggcatggtggctcaggcctgtaatcccagcactttgggaagccgaggcaggtggatcacctctggtcaggagttcaagaccagcctggccaacatggtgaaacctcctctctactaaaaatacaaaaattagccaggcatgatggtgcacgcctgtaatcccagctactcaggaggctgaggcaggagaattgcttgaacctgtgaggcagaggttgcagtgagctgagatcacaccattgcactttagcctacgcaacaagagtgaaaaagagagagagagagagagagagagaatatatatatatatattttttcaagatgcattccattaacaagagtttaatatttgtttattttttaacttcaagataaatttatatgcaatgaaatacacaaatctttcagtgtatctatttctaacttttatactttatatctggtttagtttggtttggtttgggttgggttttagaaatgaggtctcactctgtcaccgaggctggagcgcagtggtgcaatcttggctcactgggctcaagcgagtctcctacttcagctgctagagtagctgggactgcaagcacatactgccaggcccagttaattttgttgttgttgttggagagacgaggtctcgctatgttgcccaggcttgccttgaactcctggcctcaagtgatcctcctgcctcggcctcccaaagcactcggattacaagtgtgagccactgagccagcctttaattttttttaaagactgcaggtataggttcattgcttcactttccaccagcactcactgagctcctactgtgcgccacacagtgtggcaatgtgctggggcagcagagtggatatgagttgatgtttttgagagcttaccattcagggcagggggcaagggaggcagatgataagcacgtaaacacatacataaataagatcattgcaggctgcaatgggagctgcaaaggccataaggtgggaagaagtaagagagaaagattgcagggctggaggcagggagtgcaggaagaaaatgtaagatccagcagatccctgatggatgagaagatccagggtgcattccattgtcaacacatgctggctattccttagagaaagcctctttgtctctctgaccctcagtttccacatctttgtttcagggataacatctcttcctcatgggttgtcatggggattaaatgaaggtgttgatgtgcttcacacagggcccagcacacatgagcatgcagcgaacatcagcagccatcacagttgccactgctgccactgtccatgctgttaaatccatcgcaagctggagactcaggcatagatctgatgggtgccttcctcatggagtttacagtccagaggctgagacagttacagaacaaggtggtcacagctgcaggagaacttgctggaaagtggcactaaggagggaatgacttgactgagatatccaggaagacttcctgcaggaggtgacacctaagctcaggctaaaaaaataaataaataactggtacatcaccagatgggcaagggcaggagcacatcctaaactgaaaaaccagcccatgtaaaagcagagaaaaatgaactgacctgatgcatgtaggagaaatcactggtgtcaatgtagtaggaaaattaaatgggagaaggtgaggctggagagacaagggccggacagtggagggcttgaatacgaggctttgagctggactttctcctaagagctgtaggaagccagcagactgaaattaaaaagactcacagtgccaaacgttggtaatggagtgaagcaaccagagctcccatacactacaggtgggagtataaagtgatacagccactttggggaaagttctggcggtttcttacaaaacgaatcatatacctaccctaggagctggcaatcccacttcaagagaaatgaaaacatgtattcacaaaaagacttgtacaagaccgttcatagaaactgtattcagaatagccccaaactggaagcaacccaagtgtccatcaacaggatgaaaatgactaaacacattatggtatatccacacaatgggatactgtgtatctataaaaaggcataaactaccaagagctgcagcaatgtgaatgaatatcaaaatcattgtgctgggtgaaagaaggcagacacaaaagagtacctattgtatgttccatttatatggaatcttagacaaaactaatctatagtgggggaaaaaatgagaacgtcaccctcgctgtgggggaagagtggggattggctgggaaggggcgaacagaactttccgggtcgatggggagattctgactcttgatggggtttgggtcacacaggtgcatgcacctgtcaaaactctgcaaatggacacttaggatccgcgctttttgttgcatactgagatattttcctttgtagttcttaatgactccagagagttctctggctaacgattttcccgcctatgtcggcaatgttgacgatctcttcaacagttacatgtccactgtgcttaatgtgcttctgcttttctctgtctgagtggtcctttgacagctttgatggtcaaggcagaggcagaaggtactgcttcagtctgggcctgtctgtcccaaatgatccgtttccctgtcatccttaaacccttccttaaacccaccaattgccttggtgatatcatcaccaaccattttttaggagacagccccagggtgcccatcttggtggccagggcagatgtggcacaacttccccaccagtgcacatcaggtacaagactttgatttccttggggttgaacctgggccatgtgaaggacgtggctggtgtcacttgaacccggatgctgagtgatcaaagaaagttgcaccttgttctcctctgagcagaaagcccaactgtaaacaaatattgaactttaagctgaagtacctagaagggagggtacagatgtctacaacttactttgaaatgcatcaaataagatggacaaatggatagatatttaaagaagtgccgtaaaatgtgaatggtagaacttaggtgttggatatagtgttctctgtaaaactaacttttctctatgtttgaaatttttcattgtaaactattggagggaggaaagatggtgctggctatagtgatggaaaatgaatttgaggggcccagatgagattcaggaaagccagtgaggagactgtggcgattttcccaggcaagaaatgaggaggcctggggggaggccagggcagtggggtagagaggagggagagccagaggcatcgtttgttgggagactcaggagacgaggggcacagtgaggaatgacgggagacagatcagaagtcaggcctagcctgcaaggaaacccaggagtggcctctctcaggagcagcagatgctgaaagtgcagaaaggtgaggggggctggggaaagcagcggtcctgaatgctcctttccaacactaaggaaaacagtggatgagcatctgtgatggccccacctttcagtgggtgtcctcgctcccccactccatggggctgggctcctcgttgcctctttctcccctcctgggagacttgctgattaagtgagtaaatattagtgcagaaacccaacccctgtgcacaacttcaagggaggtgccctgtggttgccccatgcttccctcctggccaccaggaatcaggacaagcaaagaacacgacattcacagtccagggaggtcacacagtccggaaaggtacaaagggtttggagaactcacttcatttggtttgggagcctccgcaggtggacacggtaagagatcttaatctgactcacacactctcaaaaagagagcaaaggcattcttgatgcatcctagagagcttggttgagggttgcctgcaagtgttggctgcctaccacgccattggtggtggtgagaaaatgagtcaccttcctactctctctcagttgttctgaagatatcacggagaaaggctcggcacagtgctgaaatgtcttcaatgcctctccaaccactcgctaccttcccccttagaaagaaagtaggcaacatttgatagccagagttcaacaaaatgtttctacttgtttccattgtgactttggaaagggcatttcacctctgtaaacagcatcacttgccataaacagtcagtgatgatgggactatagtgatgatgggactatagtgatgatgataagggcgacgagtttaatgggtacttatcacgtgccaagtgctcttgggagtaaaagtgaacctggcacatgataagtaatcattaagcttaatcgccacccttattatggtcactatagtcccatcatcactggctatttatggcaagtgatattgtttttttcactttgggtagcatacacagttttctgttagaaatagatctaattggccaggcacagtggctcacacctgtaatcccagcactttgtgaggccgaggcaagcggatcatctgaagtcgggagttcgagaccagcctgaccaacatggagaaaccccatctctactaaaaacacaaaattagccaggcgtgttggcgcatgcctgtaatcccagctactcgggaggctgaggaaggagaatcgcctgaacctgggaggcggaggttgtggtgagccaagatcacaccattgcactccagcctgggcaacaagagcgaaactccgtattaaaaaaaaaaaaagaaggaaagaaagaaaaaagaaatagatcaaatttatttgagttttcaaaagttatttcatttgccaagatgcatgctaagtccataaaaacccaggcattggcagatatggagaagctaaaggtagttgtcaggggtaggtgaggacagtatataaatgacaggtgcttgggagattctggccgaaggtgaagagcatgggctttgcagtcagatagacccgagtttatatcctggctttttgtcacagtagctgtgtgacctcgagcaagttaccaggcctttttgtatccccatttccttctctgtgccataggggataacagtggacctgcaggtctgaggctcagctaggccggtagtgagcactcaggaatgggagggccattggctgggcacggtggcttacgcctgtaatcccagcactttgggaggccgaggcaggtggatcacttgagaccaggagttcgagaccagccttcccaacatggtgaaaccccgtctccattaaaaatataaaaattagccgggcatcatgggacacgcctgtaatctcagctactcaggaggctgaggcaggagaatcacttgaacctggaaagcagaggttgcagtgagctgagatcacgccactgcactccaagacagagcaagactctgtctcaaaaaaaaagaaaagaaaagaaaaaagaaatagtagggctatttatattatacatttcataaagctcccttcctttcatacattgttggcccccaaaactgtgttccaaagtcaaatgcgtggaagatgaatagagggagggtcacgtgtgtgtatgtgtgcgtgtgtgtgtgtgtgtgtgtgtgtgtgtggcaggggtgttgagtgttggttgggggagggcatccagggcgttcccaggaggctgaaacctctcatgagcctctgatggtgtcgtttcaggatcctacacatgttctcatttttgttccgcatcatgactgagataatcgcacattgtgactgtatatttatttgtctgtttcttgctctccctccgtctctgtctccccaggacactgtgagccccaggagggcaggggctgatctgtgggctccctgctatatccaaggcacccagctctgtgtccacacagagggtgtgtaaggtgcatttgctgactgactaactgacctgctagccgactgcatctgtttgtgccaccagtcttgaattactaaagaaaattagagggttgggagagaaatactgggggactgacccctaaaatcatacaagccctgcaacatagcaaagtcttaggctctagcctgctccagcctctctggccctgccctgggctgctagtggaacctctcccgccctcctgacctggagagactggagatggggtgggggtgggggctgcctcaagaatctatctccaaggatggccatttgagggcagatgaggttaaacctccaagcaccccaaactgaggctcccaacttgagggactcagctgcccccaggggcctggtccagtgattcccccatctcccagggacctgcccatttcccaagccccccactcaatagtcacaccgttttcaaggacaggtagacactggtacgtgagggttctcacaacagctgaactttgtaagtcaccccttcctgtcttcctttatctagttacagctagacaatatgatatgatatcaatcagagcaactgcaataccagtcacagaaatcccagtgtcaagagttccttctggggttccccgctttgctttaagtgagcgtgctgtgagtatgtcccagctcctgtcccctgcagcaccgctattgtgaagtcaaagtgagttaacaccatgctcagggcagggcctggaaagaggacctgctcatctgattgggtggtttccatgtcaaggccaggcacagcacaggccgacagctggggcccagagccccttttgccaggcacagactgcaggcacagagaggtgaggacatttgcctgaggccacacagtaggggcgggtcaccgcgtagtgtgtccaggtgcactctccacaggccgcccagctccctcctgagcttcagaaagcacccaagagattggcagagagaggagagagacagtgggtaagagagagacagggcagggacagcctgaggaggagggaaggagagacagaaagagaaggggatggcaagagcaagacagagacctctgggaaagccagacagtgaagacaagcaggctacccgaggcctggttttgaggatctgagcacactgtcccctgccttgggggaggctccatacagcccacagcgttctgggaggcactgagggcctcaggaccccagccctgcttgtgctccattcccatccccaatcccatctcacctccagcccctggttctgactcctcatgagaacatccccagctccccttccctgccacccgccccactcccttcccctccagcccaccttccctgccacccgccccactcccttcccctccagcccaccttccctgccacccgccccactcccttcccctccagcccaccttccctgccacccgccccactcccttcccctccagctccccttccctgccacccgccccactcccttcccctccagcccaccttccctgccacccaccccactcccttcccctccagcccaccttccctgccacccgccccactcccttcccctccagcccaccttccctgccacccgccccactcccttcccctccagcccaccttccctgccacccgccccactcccttcccctccagcccaccttccctgccacccgccccactcccttccccttcaagcgactcaggcaagctcccagacactctttccaaaacccaccctccttcctttgcccctgaaaggctcccactctggaatgccctcccctcctaacacatccctatcccttaagcccagatcaaatgtcacctcttccaggaagccttctctgaactattccccagggaagcattgtgatgccattgctgatagcagcaacaaaagcccagtcatgccagttccagaatcaccaggaaagaaagaaagaaatcatttttcccctccctaatcaggcaggttatccccttctgggccccactgagctgccagcgactgtcacacacgaggcaggtgccagcctccctctctctcagtgctgaccataccatctgtgtgtttgcccctgttctactgtttgacatacttgacctgtgctggccttattaagcccatcctgtctgcaccctggcatttgtattgctcgtctggccctaataacaatccctgtgtcacctctatcctggtactttgcacacttggccaaggctcacggcagtgaaagcaacacatcaccctgcctgggttcccattcctggagctctgagcctacgcacatgctgcccacgtggatgaaaatcccagcactcagccggctgcctgcatccacctctgttgggtcacccaacacaccttcatcaactggactgtgggccccacgagggcagagatctggtctttgtctccccccaagagctaggacagcttccaacttagccagggttcatttgcactgaatttaatctatttctgtcccacaaaagagggattatgttgtaagttccagtaatgatttctttatttctttcctggtggttccgggaccggcatgactgggcgtttgttgctgctatcagcaatggcatcacaataattcctcagagtcccaggttggtgggggctgtgggtcgggcattgggaaaggaatgaggtttcctccactcccttgtcctgcgcccaacctttattgactcatttgcaggccatttagtggggttgtttacatatccaatacatatatttagtgtaaacatttttttaattctgaaaaataccaagaagatggtgaaagtgacctgtgatcacaccaccaagaaacgtgtactgttgatgcatttccttccagtatttttttctagattaaaaaaaatttttttttgttaaaaaatagaagaaacagtttcccttttcacttacttctgttggttggtctacattgttttgtgatggctgcctggtggcccacggtttatttaataaatcccattgctggatgttaaggcgggtcccactttagggctattccaggtaaggctgcagtgagcatcctcacagttctctatgctcaaatcactggccagttcccttggcagaacctccactgaccctgggtcaatgggtttgatcttcctaacaacatacttgacctcagaaacagcccagtcctcattgcataagaactgagccccctccactataagcaaaggtcatcacagccagcctggccactgcatcgtggagcccaacatctttattctatagctggggagactgaggctcagagagaactgacttatccaaaaccagcccaaaggtagtggcaaactccatgtcatctagggattttctccccactccattatctttaatattttgcaagaaaatccataatccttaacaaggatgctggtgggatgtagcaaggatgaagcatctgtgtctgctcatgaccgacattgttaatcaatcaccacattctctcctgctgagcccagacccttgaaagcttcaagagccatcaccaggcagctgaaattggtacaagagcaaaatgcttctaccatgctggtggagcatctttggtggcaacaatggaggacctgagcttctttaggagtggcttgaattcttgctttccttctttctttcgagccagtgacagttggcaaggcctctgatttccatctgtccacgtcatcagaaaccctctctggttttccgcatgactgcagtcttcccaggagagcttggccctcgttctggctggagatggtagggcaggctgggtcagtgcgtggagcatgggctctcaattcagacagaaatgggtcccaatcctggccctctgctttatggttgtgggaccttaggcaagtcaattcccttctccaaggtcctacttcatctggaaaatgggaggataaaaacccctattttctcctctcttggcctcagtttggtgatctgtagaatggagatgatcttttccactctgccatcttgctgtgtctgagcatccagctttgatttaacatcagattatctccccacccctaaccgaggcttctgtggatcagcttggtgggaaaggggagaagaggtgtgtgttctctccctgcacttccctctccttctctttctctctctctctctctctctctctctctccatccagaaggaagaaaaggggcaggagaattttcctttgactgatattgttgccaggtagttcccaactctctggggagcccaaaaaatgttgagagccaagtcttgtcggcaccttcaaagaggtagtcttacctccctgtggggcttcttgacctgcaccccccacaccagggcagagcctctttgatggctaactgtcccgcaggccaccccagccactcccagcccctggttctctagcgtcctctccaggtggtgatactaggaaggacttcaagcagccctagaccgatcttcgtcttgcagggtccacacccggccctgggaaaacacacacacacatgcgctttgaccctgcccagagggaacagagagcagtaattttccacttacggaagtcactttgcccaacatgacttcaactcatcaggagacacaacccagtctactgcaagccccaactccaggggagacaaacctcaagcccctaagtggtccctgaaaaggtccctcctgctaggcctgcattgaggcccaaacacctcctgccctcctccctgggagaggaggagggaccacagctgtctcccaagaaatacctctgccatcttcttcctgtcccttcttggccctttcgttgccttaatctgggtcagggccccctgcatgagagatgcaggagctgtgcaactggtttttagccactgcttggtctgtggcccaggacctctccttggtatacagcatctgggaaatcatggtgcctaaaacaacactcaagttttcagacccagttccagtaaatgctagtaaggacaccctcagtgtgcagcaaaaagagccctaccttagagagggtggtccccttgtcccctgctcccccaccccaccccaggaggcaacactgtagctgagacttggtgaattagaagaagccagaatgagagctggaaggagagcgctcctgggataaggccagcatgtgcgcaggccctggggtgggagtgagaggagcgagggatgaagtagagagaggtgagggctgaaaggtggccagcagccaaacatgctgggaagaggacatccaggccaggtggagcagcagtcaggcagctttatgcagatgttgcgttcttttttgtgtgtgtgagacagagtcttgctctgtagcccgggcgggagtgcagtggtgcgatcttggctcactgcaacctctgcctcctgggttcaagtggttcccctgcctcagccttctgagtaactgggtctacaggcacgtgccacctaaaaaccatgcccgtctaatttttttttttttttttttttagagacagggtttcaccatgttgaccaggctgatctcaaactcctgacctcaggtaatccaccagtatttgcctcccaaaatgctggtattacaggtgtgaatttaccacttgctgaattctctgatgtttcaagcatttctcatgaccttacgagaccctcaaaatagtcccatttcacaatggaggaaacagtctcatagagaagaagcaattttcccaaggctgacagctgtcagtataggagcaggaatctgagccgtgtctgtcggcctccacaggcttcctcctgcactcctgcgcttcttcccagacagggcacaattaggttttcaggagggtgaaggaggtactccagaaagaggacacggcacaaaaaggcctgggagctgaagagaggtggagccaaggccaagagacgccagcaacctgaggaggggccacgcggtactgagggcaggtgtggagtctggggaccatgggcctgcagagatgcagccagctttgctgtcccagcacgtggcaggaagcaggagctgatgcggccccaggtcttggcattgggcccgagcaccgcacagagggtcattgtccatgggcagtgggcatggccagctgggaagccaagcaggggcatttgcctctctggagatgtgcccaagggatcggcagggtcctcccaagagctctctcaaaacacctcacctttaggtattcagggcttttggtgtgtttgcaaacatggcaggacagcaaacgctcttcaccttgttcttcttgtcaaaaagcaggaggaagagaccagccagggcctggccacgtactttgtgacctcagaacacttactgcccctgacttgtctgctgcagatggagacaggattcaacaatggccatcccagctctaaaccacaattccattcttctagacaaaaactgggtagcaaggataattccccagatgacatcaaaaggccatgttggtgtcaccaccacctccagtgctaaattgaagtctcaggggaaggacagtgtggcggttaagagggtccggtctggactgatgatcgggttcaggtcccaaagctggaatccctggtcatgtgaccttgagcaagtcactcgcctctctgagcctcaggtgccctctgtaacattaacgctgctgatgcccacctctgggtgactgtgcaggctgcgtgagccaagacctgggcccaggtggtggatgacagcgtcctgctgggctctgacatttgtcctttaggttcatggtcatccctccttattcttttggtccacaagtgctcatggagattcctaaagatgcagacaaggtagagcagattttaattgctgcggaatgaatgaatgaatgaaatgaaagcccatgctaagcactgtgtaggcatgcacttcaactcatgctcttaacaacctatgaggaggagctactattatccccatgctatagatgaggtcattggggcccagagaggtgaagtaccttgcccaagggcacacagcaaagcagtggcaaaaataggattcaaatctattctcctgggtgaattaattgatggagatgtgtatctttgatgtatttaggaataaggggtgggtaaggctactccttccttttcccaaattgattatctggattaaacaattgttgtaatccctctacaaaggctcatcctattataagcaataataatattaatggcaacggccactcacatttatggagtgcttattctgctatatgcactgtgcttctctcagcctggaccttcctttctccaaacctcaggaagctggagtcccaaggctgcctccgggcggggctgtggttcagcagaagccacaaatatttaccttggagacctcggcctggtctgaggcctctgcctaaagacaaagcctgtgctggggtgtgcaggatataaggttggacttccagacccactgcccgggagaggagaggagcgggccgaggactccagcgtgcccaggtaaaagtagggaaggggctgaaagccaaggttgccaggaaggttctgagctagagatacctgttggggtcaggtcaggagcacaggggaggctcgccctcagggaagggccctcggtgagtcaggatccgctgagggtcagggccaggtgtagagagatgcccagctccctcgcccagaggaccaaagggcagtgacgaagggatggggctggctgagtgttttcctgacctcttcctagtgacataaacccactctgcacataccagttgctctgtcccagctgtgctgcggtggtgctgggacaaaagaagcatgagacgcagactctgtccctcaaagaactcccagtgcaggacaatgtggtgcccaaggaagacccagggacatgggagtggaggacagtcaaagaagggatcctggaagaggtgatgtgttggttgcaaagccgagtagaaggcgattgggcaaaggaggagagaaagatattccacgaaggggaactagcagaagcaaaggctgggagaggaggtgccatatgacaggggcgtgtgtggtgcctggatctgggggaggagagtcttttccacaggagggaaacagggatgctaccatcctcgtgggtccctgggtttctctgatccaaagaggactgagcagtgtgtacagataatgcaggacagacagagtcaaggtatttgcaaggaaaatatggagtggggccacaggggtgcctggatgccggggttcagctctgtcttctggctttggctgcaaggtgtctccttctgactccaatattagtaataatacctgtcataattatcgtggaagctaccatctactgaacgcttggccatgccaggccacaaatagattgtctcatttaatcttcccaaaaagcctatgacataagtactataattattccccattttatagatgagtaaatggaggctcagaaagggtaagtcacttgtcaaagatcacagagcaagtggtagaggcaggcctccaactagggttcatctggctgccaagccaataatattttcccctccaccttcaggcctcctaacactaaccttttcagcttagcaggctcagatttccaattctttcggggcttccagaggctatgcaattattcagcagccatttattaagcacctggtctatgccaaccactatactggatgccagggacacagcagggagcaggcagacccagccctccctcccagagctcacagcttggtcagggaagcagaggctgaatcattattgcaagggtctcagaagagctcacactgctccagggcacaggagacacatgtcatccggatgccacatttgtctttggcaaaaagaaatccacatgctgaaccaagcgaggggctcagatctctgcagcgtctcccctccctccaagcaggacagtccacaggggcaggagcttccatggggggctggcagacagagccagggtgcaagctggagagctcaggactggactacagatgttgatgccacacccctgtggagggaggggacagagcagccaaggggccagaatacccccaagctcctctccctggcatgagccacagggccctttctctctctctctttctctctctctctctctgcccttcttttcctggctccaagaagccattcagtccctccccagcccccttagtattgcagattaagcaaagagctttttcacaactttgagtcctacctggctcctcatttccttcctgcctccaaccttcatgtcttgggccccaggacaacatttctccaagtgtggtccaggttccctgtctgcaggacaggggaagctttatagggaaagtgacaaatcttggcagggttttaaaggatgaataggagttcatcagggagatatgggaggagaaaagcattccaggaagcaaggaagagcaagagcaaaggcacggacacaggagagaacacagtatgttctgagaccttccaactgcttggaacttgctagaacaaggggagagaaagcaggaggtgaggtcagcagacggtgaaccatagagggttttaagtgtcagactgaggggtgggagacacgggaagcagaagttctttgttctgagcattgttgctggattttctgtaagaaaatagctaatacaggctgggcgcggtggctcacgcctgtaatcccagcactttgggaggccgaggtgggcagatcacgaggtcaggagatcgagaccatcctggctaacacggtgaaaccccgtctctactaaaaatacaaaaaaaaaaattagcctggcgcggtggtgggtgtctgtagtcccaactactcaggaggctgaggcaggagaatggtgtgaactcaggaggtggagcttgcagtgagccgagatggcaccactgcactccagcctgggtgacagagcgagactctgtctcaaaaaaaaaaaaaaagaaagaaaatagctaatacattccaagtgcttaccatgtgaaagacaccgtgctaaatgctttccagatattaactcacttaatccctcaactctgggaagctggggtcattatccccatttgtctgataagaaaactgaggcacaaagaggttacgttgattgcctaaggctacacagctagcccaggcagttaaacactgcactcaacagcctctcctggacaccgtgccccaggtcaccgggcatcatgggcctgcccttggcccctctgcctcaggtccctctgtgctcaccccaggtctggcatcctgcacttgctgccctctgacacctgggaagatggccggcccgtggaccttcacccttctctgtggtttgctggcagccaccttgatccaagccaccctcagtcccactgcagttctcatcctcggcccaaaagtcatcaaagaaagtaagttttgtccctccggagctggctgccataagacaagggggtaggtggagcagcttcccaaaggagggagagagttcctcatcacgggggatgtgcatggctgagatcccagaacgtgggtgaacatgagtgggaggttgtaaaggtctggagagtctgtgatctcaagagtccacgattccaagaaccccttcttaaattccacagttccaaagaccctgagtttccacagcctgcagaaggggcatgcagccactgcatgcagtgatgcagctgcctctcccactgccttcacctgaaatcccatcgtcagagcaccccgtcttagttagacccagtgtgctcctcctccccagagcagagacccttgactgcaagtgtggcagcctgggtcccaggcacagtgtatcactttccagctctggggcactgggccagtccctgagcctcagcttccaccttgggacacaaataagagggccttcctcactgggtggttggaattgactagagctttatgaatgctatgaccatggtttcaacctcagcacttctgatgttgtggaccaaacaactatttattatggggggtgtcctgggcactttaggatgtttaacagcatccctaacccaactgtgacaaccaaaaaggtctccagacattgacaaatatctcttaggggacaaaatcatctcagtggagaacgactactctaaagtctcatccccttagaggggactcacctgtcagctctggaggccacttgagcacttagaggaccagacctctgcattcagggggactaggggcctgggtcatggccagaggggcaggggcaggtcctgtgggaccaacaggctctgtagccagcggatggattcccaagtaaggacgggaagcagagggctctgagaggttggagggaggcagaggtggcctggatccacactgtgaagctcaagcatgtggaatttcagccagaaggagcttagagatgaacaaccatgctttaggctctcctataaggagttgtgtacaagtggttggttttgaaggtgaccccagaaacacctacaggagtgtggggaggcaaggcagggaaggaaaggcatcccatgaggggtgcatgtccaagccagttaccactgtggcgactgaagctcagtcctgcctagcaactgcatctattagggccattcaggagacagaaaccacacagtaaatgccaacaggtaagtttaatgtaaagaagtattaccaggggattggaagaatgaggaattggctaagagggaaaacagacagagctctaaaggataacctagggatggagggggtagccaaggacagagcaagttcagaggtagagaatcctccccagccctctttgtagagggtgtggttgaagcccactgtgtggtggagaagtttgctggcttgtcccaggccagagctggtccacagttggcaatctgacgctagtgggtggagaactacctgccagggggccaataaaattctctgggaagctgcccctggaggaagggggctgctgttaactcacggggaagctgtctctggggaactgcctagaagctagccagggtgcctgcagaactcactcagcaaaagccactgggcagtgacaccataggaacctggaaagagaagcacaccagagccatgaagggaatcccccccatgcccctccagagtctccactgaaagggcttaacactgtgccaaatggcaaaaaagaaatattcactgggcccagttccattaccacagagcaggcaaagtgggtggatttgcagctgagaggctataacccaggagctctgatacacaatgagggacacacatctgagccatcctgcctgaggggtgagggagctgggatattgatacaccaactctcaccaatcactggctgaagtctgctcctggggcatcagctctccagcacttctgacctgctctgcacatgagccagatgggctctagctgctcacaaaaagccagctgggacaagaacccagggctcttgacacttatgcctctgtcctggctccttcttcctctgctcagcacttgaggctttttggacaacacatccataggatatggatgccagacaattgttaacaagtgtgctttggcagcaaaacagccccaaacagagttttgagggttccctgcctgttggccctagaaatgcttgcaactggctcaggggatgagtgcaggtccaggtgctgagtgcagtggccgacactccccacagaggctggcaatgctcaggggtgtgaatggtcccagcctcgctcctgatgtgaaaacgacccatctgggctactgtcctcaaggctacatctacacagtggggactggcaggctggtcctgacctccaccacagtagagatggctacaccctcgccttacctcagggagcctcgagtgatacccctccccagcctggagctcccaccaagccttccttcttgcccctcctcctgggccctaatccctggggtctgcctccagagctgacacaggagctgaaggaccacaacgccaccagcatcctgcagcagctgccgctgctcagtgccatgcgggaaaagccagccggaggcatccctgtgctgggcagcctggtgaacaccgtcctgaagcacatcatctggtgagtggagcaggaccacaccaggagctagccccttcccacacctttgcccgggacacgctctgcatgctcagtcaaccagtctgcaagcatcgacttgtgtcagatcacaaagagtggatcaaacaaagcccctccgtcaagaagctcccagaatagttaacaagaaccataagacagtgacacaggaaccctaatacaacaaccccagagcaaggccagggacggtggctcaagcctgtaatcccagcactttgggaggccaaggtgggtggatcacctgaggttaggagttcgagaccagcctggccaacatggcaaaaccccatctctactaaaaatataaaaattagccaggcatggtggcagaagcctgtaatcccagctactcaggaggctgaggcaggagaatcgcttgaacctgggaagtggaagttgcagtgagctgagatggtgccattgcactccagcctgggtgacaagagtgagattctgtctcaaaaaaaaaaaaacaaaaaaaaaaaaacaacccagagcaaggttgtctggggtggcacagggaagggatgaggtgatgcttctcactggaggtgacagtggagccgatgactcaatgctcaccaggagacaagaagcaaatggcatccaggtagaagaatcaggctgggcaaaggcatggagaagtgacagtcggtcagaatggctagagctcaaacctcaaggcaaggagtaagggatcagcagggtcaggtcacagagggtcttatgagtcagctcaaggagctgggagtcaccacctagaagagaaggcaccataatagcattgtgagcaggagtggaggggagggatggaggcaagaccatctggagaggagtcggtgggcagggccagggtcccgctgctgcctaggcaccccagggagatggaaaagatagagagggagtggatttgggaataatgagccggaggcatgattctgatctctcctaaaccccatccaggctgaaggtcatcacagctaacatcctccagctgcaggtgaagccctcggccaatgaccaggagctgctagtcaagatccccctggacatggtggctggattcaacacgtgagtgacccctccatcaagtacagtaggcttgacaggctcatctgctcgttccccctcccccgcccccaccatgcaggtgtctggaaaagagagttccgagcagagagaagagcaagtgcagaggccctgtggcagcagtgtacttgccttgctcaaagaatggcaaagacaggggaaagagagagggggcatggtaggagatgaggccagcaggcagccgaggccagatcatacaaggcctcttgggagaagataaggacttggcttttgctgagtaggacgggagccagggaggattctgagcagaggagggatatgctgtgctttcacatttttaaagactcctggctgctgtggggaaaaaagactttctgggggtaagagtggagacaggaaggctatcccaaagctactgcaacaattcaggaggagataatgatggcttagaccagggtttggggcagggaggtgctgagaagttgattggattctggatatgttttggaggtaggtggggacaccaggatatcccggggaactgaatatgcatgtgtattcagggggaaagagagagaagtcaacgatgactccaagagttctgcctgcaccactggcaggatggagtggtcagtaaccaagacaggcaaggccatgagaggagcaggtctggggaagagccagtccagtgttgcatgcgctaaacttgagaagcccgtgagacatcggagtagggggctgggggtaagtttggaagctgtcagcagacgaaagacgtttcaaccaaagaggagtctgaaaactgagcctgggacatgctggggtgaagttgggtgaagatgaggagaaaccagcaaaggagactgaggaaggaggtgagggctggaagacagagacggacggcagggttgctccagcccgagcttgcctggtgctcacatggtcaggtgcctccacccgctaggcccctggtcaagaccatcgtggagttccacatgacgactgaggcccaagccaccatccgcatggacaccagtgcaagtggccccacccgcctggtcctcagtgactgtgccaccagccatgggagcctgcgcatccaactgctgcataagtgagtgtcgctggccaccagccgggctcccatcctgcctggaaggaacgccaggcagtggacttcccccattttacaaatggagaacgctgaggcctagagaaagaaagggacttatcccctcctgattcctgatctggggctccttccagggaatctgtgatgccaagggaagttcaggacatcaaggtcagaagcaaccatggtgggtttcaggcatgacaccgggaggtggggcaaatctttgaagggggaggcctagaaactcctccaaacaccagggcaggtgtaggtggagccaggggcaaaaacataggctttgggtcaggccaacacattctcttcatttgctctccgggtgatgatggccaagtggccaccctgtgtctcactttcctcacccgtaaagtgcaggtaatgacaccttccaggcagtggtgagaaaactgatcagacaacagccatcaagcactcagaacagtgcacgcgcatggtggtgccaaaaaacatggcgcccccccttcccttcttagcaggaggacagggagaaatgccagctcccatcatcccaatgcccagcataaagttccaatgacaacacccagccgctgctttctgataactctttgccactgcctacacctggctcaggggctactcccagccccgtctctaacacgtcctgtgaccttgggcaggttccttcctcccttagactcagcctccccctctgtaaaatagaggaaggggtgatcatctctgacccttcctaatgtctctcgtgctctcttccctgaaaggctctccttcctggtgaacgccttagctaagcaggtcatgaacctcctagtgccatccctgcccaatctagtgaaaaaccaggtgagtggaatcagggcctctctggcctgtgggcattgcgccccctgtggggcttgggtggaactgcaagttggtgctaagtgactggagtctccttgggtgggttttgctgaaagaattatctggggctggatagcaaagagtcatggagtggggtgggccattgacccaggcagacaggcaaggtcatgggactgctaaaagtcagccaggagcccgtgaacagtgacgtgctgataaatttttagcaattgtctctggaggggttgttgaagggaggcaaacctgatttgtagcttttgcggatttccctggtggaaatactcccttcagggccaattttaggcgaccagtgtgatgtcactgaacagagttgggaaaagatatacaatagcacacgattgtatatttccactaaacagatacataaacatgatctcaggagtaatagatagtagtaaaatacagcaaactaattaggaagcaatgcgttttaaatttttattaaatttgttttaatataatttatttaattgtaagtttatatgtctaatttgtaacaatgtctgggcttagcacccagctcagaaatttgtggaaatttaacaattggttctcaaaagctagtacaagctggctctagcacggcactgtcacacatcaatctggctgtggtattcagggctgcaccacccaccaggtcctgttggattttttttctgcgtcagtaaacacaggtgactctcattttagttgcccctatttgtcacaggtatactaaaactttgtaaattgaattcatccacattaaccagtgatttccactgtaaattccaagatgtgttcgtaacaatgggccacccgatctagggtcaaaacaccttgtcaaatagctaatatttcttggaataagacttttttctttgatttttgtttttgtttgtttgttttgagacagagtcttgctctgtcgcctaggcgggagtgcagtggcgcaatctcagctcactgcaacctccgcctcccgggttcaagcaattctcatgcctcagcctcccaagtggctgggatgacagatgagcaccaccaggcatggctagtttttatatttttagtagagacaaggttttcgccatgttggccaggctggtctcaaacccctgacctcaggtgatccgcctgcctcagcctcccaaagtgctgggattataggcatgagccactgtgcctggcgacttttttctttgaaaagatgatgtaataaatgaaaaaatttggggaaaaaaaatccataatccttttactttcacccaggagcgctttgatcttttgcagattgccttcccacctccatccacatgcactagtatttttaagaggctgctcttggtgtcagcctttaaatcagatctatgtttcaaagtcattatacaatacttgtaattattaaataggtacattgggtttaataatttacgaaaacattccagcaaatccttttttaaataatgtgattttattaagagtactttaaaatgacagtagcaatatttaaaacagtattttaggccagggccagtggctcacacctgtaatctcagcactttggcaggtcgaggcgggaggatcacttgagcccaggatttgcgacttgcctggaaaacacagagaaacccatctctacagaaaaataaaaaattagaatagctgggcatgatggtgtgcccctatggtcccagctactcaggtggctgaggcagaaggatcgcttgagtctaggatgttgaggctgcagtgagtcacagttgtgccactgcactccagcctaggcatgacggcaagactctgtctcaaaaactaaataaataaataacactgctttatataaacaatgtgattcttattaagagtactttaaaacaatggagatttttatttttctccaagttggcttccatgtccttaccttcaagaaaaatacagtaaaacatttaatctccattttgtgaaatatacatcaactgtacaatatactattacgtttgtttctctaataagctggagttatgattttcaacttctgcttctgcactagtaaagcttaagagtagcatgtatagtcaaaggaagatccattattttaatagtcgaaatatctacatattaaagaggccagggaaaaataagtgaataatcaaaaactaaataaagctcaaataagatcttaaaaggttaatttcagaagcaatactgattcagcccaattcaagctacctttctccagtacttttttggaagagaatggggagagacagagagagatgagaagggagggaaccaatataatgaattaatgaattgtgtgatataatgaatataatgaacaatgaatataatgaattgtgtgatctcaaagttcaagacaatggcttcttataggtagaatgttgagactccgaccttttagcaaaggtacgtatccagggagttttttaaagggaatccaaaagtgaaaaacttcataacattggaattttcttatgtaagaaagaaaattttgtttctttgaataattttatttatctgtttcaaggtgggaatttcataaagtaggacccagctgtagattttcttcccagcctccagcaaaatcatattttatctggcatcacactttaatagttaaaaatatattttccagtagaaaagatgacaaaaacttggaattatacaatgctccttgcatagtatctgtctttaatggtgaaaagctaagtagaaagaacaatgtgtgaaagccggcatcccattatcatcagcaaatccactacattcactggatttgatatgatggtcatagaaatattttatttggcatgaagggaaaaggcatagcacgtttaagaggtgagcgtctggtaggagctcatttagaaaatgttgaggccaggcgcagtggcccacatctgtaatcccagcacttcgggaggccaaggcaggaggatcccctgagatcaggagcttgagaccaggctggccaacatgacgaaaccccgtctctactaaaaatacaaaaattagctgggcgcagtggcgcacacctgtaatcctaactacttgggaggctgaggcagaagaatcacttgaacccaagaggcggaggttgcagtgagctgagataacgccactgcactccagcctgggcgacagagagaaactctatctcaaaaaaaaaaaaattaaaaataaataaataaataaaatggggatgatggaatgacttgctttatataattgtgagtattccataagatgcatggaaaaaaatctagctaggctggtcgtggcggctcactcctataatcccagcactttgggaggccaaggcaggaggatcccctgagatcaggagcttgagaccagcctggccaacatggtgaaatcccatctctactaaaaatacaaaaattagccagacatggtggtgggcgcctgtaatcccagttactcgggaggatgaggcaggagaatcagagaggatgaggcaggagaattgcttgaacctgggaggtggaggttgcagtgagccgagattgcaccactgcactccagcctgggtgacagagtgagactcgaaagaagaaagaaagagagaagaagaaagaaagaaagagagaaagaaagaaagaaagagagaaaaaaagggagaaaaggaagcaaggaaggaaaaagagagagagggaaggaaggaaggagagagagagagaaagagagagagaagaaaggaaggaaagaaggaaggaaggaaggggaagggaaggaaggaaagaaggaaggaaggaaggggaaggggaagggaaggaaggaaagaaggaaggaaggggattgggaagggaaggaaggaaagaaggaaggaaggaaggggaagggaaagggaaggaaggaaggacggaaaaagagagagagggagggagggaagaaaggaaggaagggagggagggagggagggagggaaaatgttgaaatctttttcagtgtaaatccatgggtctcaaccctcgttgcacatcagagccatcagaacctgagaaacctttaaaaaatactaatggctaggccctaccccagattcagaagtaactggtctgggtgggtcctagtatcccagaggactctactgtgtagccaggattgagacctgctgatagaaatgaaggatggggaattgtgggataaaatgcagaggttccccgggacactttccggtgagaaacaggctcccctggcagtgcctgctgggagtctctgagctgaaagtcttccatcctctctgggctctagattggcaatgcagccaggagcagggaacggttattcataggagttaacatttctcaaaggcattgtcattcctcaagagtattaaggggtggtcaacaagacaaaaatgtcctcaataatcttggagcactgccctgaaaagtgagtcaaatgtttgaccttctccctaagcagaacagctcaggtcagggttaggttaggtcagagtttctcagccttggtggtactgacattttgggctggataattctttgtctggatgctgtcctatgcacagtaggatgtttagctgcatccctggcctctacccactagttgtcatcccctccaagttgtgacaactaaaaatgtctctagaaatttccaaatgtctccttggggacaaaatctccccctgttgaggactgctggcaattttaggaagagaagtgcccagtgagcaaagggatgtgttgggctagaaagccacaaagggcacaaagagattgcccaggagtctggttgggtctgccttgctggcctctgttccagagtctgacatgtgaaaagaactcagtagcaacttgctgtatgaataaacaaattctccatttaactcttgttttttcttttaaagtagagtcttgctctgtcacccaggctggagtgcagtagcacgattccagctcactgcaacctccacctcccaggttcaagcaatccttgtgcttcagccaaccaagtagcttggattacaggagtgcaccaccatgcctggctttttgtatctttagtagagatgaggtttcaccatgctggccaggctggtctcaaactcctggcctcaagcgatccacccaccttggcttcccaaagtgctgggattacaggcatgagccattgcgcccagcctccatttcactctcatggaaaacatagacacctgtgagcaagacaaggagtcagagagggagggctgctggcaggccaagcacaccctgggcacagggaaagggacaaaccactgcaaaaggtcccaggtggccctgcaggctgggttcaacacacgaatgaatcctcaacccatggatggaacctggctggccatgggcacagcagtaggacacaggccaggtgggctgggcacagcccggggctgctgtggggctgcattctggcccctccctgatggagccccttgcttatgctgttgcagctgtgtcccgtgatcgaggcttccttcaatggcatgtatgcagacctcctgcagctggtgaagggtaggtgctctgctctctctcccactttttcctttactacggagctggcctccagaccctgactccaccaagggaaggcctccccaagtcaggcctgagctgcaactcaggcccagaagcaggtgagacaagcatcagttgatccctgccccagacgcgcagacagaaattcgccacgactaggacttcatgagctcttactatttgtgcagttgtcaggtcagtggatgccccaagttcaaatcccagctctgcccctgacttgctccatgactttgggaaagctaatttacctcctcatcctcggtttcctcatccataaaatggggcttaaccatccctacaacataggattgttagtgaggaataaaagtctacaggaaagttctgggcacatagcaggtgtccctcttggcacagagaagcacttacaaatgcatgctaaatggatggatggatagatggatggatggatggatggacagacagaagatgctaagattacaagcatgagccatcacacgcagcccccggactagtttttatggatactttagaaaactgcagcatcaaatagttctatccatctcgttgcagtttcaaattttccctccatccaaagggtttgaggtatctgagaaattaaagcatgggttaaaaactgagatatctggtttaaaaaataaaaatcagagatgattcgaagggcaaagacggaaggaagtcatttctccctcccccagcatagcagatacgggagggcacaggctcctgcccccacatcagaactctgccatgctcaggcccccagagtggaaactggcggagaagaagaaaagtctaccaactgcactttgggatcagaagaggctcattccaagggcgaccagagaggagaagggagagcagcatgcactgagcgccacagggcatctgccatgggccacgccctcccgctgggtgttttgtataggcacatctcactgactcctcagacaactccatgaggtggcagtcatgaccccccttcactgtgatgaaagaggctccgagcaatgaagtcactgtccaagttcacagaggcagttggtgatagaggaagacttgagttctgagcgagtgtcattcggattgagccgttactaggtgccagttgtatacatgaagcaggaattactattctaccgccgtttctttccttttttcttttttttttttttaattcccaaagagttcttccaatcgtcagatatttggtcagtattcagagtaggatccagagttcacacattacattttgttgacaagtctgtagatttctctttgtaaatcacatttttttgttgttgttatagccattttcggggaccttattgactttaatatactttttttttttttttggagacggaccttttttctttttttaaagtaatttttacaggagtcatgctcatcgtctctatgtccttccgattttagtacatgtgctgccctggcgggcactataccctcattttaagacgaggaaacagattcagacgcgagaagagaccagccaaggtcactggggctcaaaccgaagtccagctggctcctccgctgccccgaggacgggcccggaggtctccctggagcggtaggcggccggtccctggccctccagcactccccatcctcggccatacaccggggcaggtgacacaccaccgccacctggcggccaagtggggaattctgacgcgaacacgagatctttggggggagcagaggagccagtttggatttcagagtagatgttaccaggcctctggcttccagcctaagcttccttgagatccaggtgctcatagggtgtccagacccagaaccacctgcatgggggacgcggctttcagtctggtaggggcggtggagtgttacatacaatagttcagttccgttccaaaccgggactttggcataaaaccgactgggttcccatgctctcatagtatggctttgaacaggtcatttccctttcctcagacttggtttcaccatctgtaaaagggggtaataataagacctacttcctaacgttatcatgcagatgaaccagctgacatgcagaggcctggcacttagtggatgctcgataaatgtcactgtcatcactgtttgcatcattattatcaacatcattattacctgctcctccctacctgcccccccatgcaacagtacagctccacctggaagcagccccccaacttccccctccaatactgccctccaccctcacagaactttcttcttgtccttgagcagtgcccatttccctcagcattgaccgtctggagtttgaccttctgtatcctgccatcaagggtgacaccattcagctctacctgggggtgagtgtcccaggaccttgagggtgaagtggggacattgctgcccttctctgaccaccaggagtcagatagcatgggcctgtgttaggagagaaaatcctggtcaccattaggacacgggctgatctagaaaaatcactgcaggctgaatatgtcccatgcaagtttgttttgttttgtttttttgagactgagtctcactgtcacccagagtgacatgggggggcccgagtggggacactgggccctcagcctttctctcaggcaagtccctgccaatccccaaacctatgacaaccttgaaacaaaagccaaggatcaagaaacacagacctaagtttctctcctagctctatgattccctggctatgtgactttgggcaagttcctttacctccctgagcctcagtttccttgtctgcaaaatgtcagtaataatggccactgaggagaggatgaaatgagaccacaccatgcctggcagaccagaagtgcccagtaactgtcagctccctgtccaatgtggagctgcacagccatgctgtggctggacgccccaaagggccagaccatcctggtagcatgaatcccagactaggtttcttttgttttgtttttttgagactgagtctcactctgtcacccaggctggagtgcagtggtgccatcacagctcactgcagccttgacctcctgggctcaagcgatcctctcacctcaacctcctgagtagctgggactgcaggcactcgccaccacgcctggctaattttctgtattttttgtaaagatggggttccgccatgttgcccaggctggtctcaaactcctgggctcaaatgatcctcccacttcggcctcccaaagtgctaagattacaagcatgagccaacacgcctggcccctggactagtttctatggatcctttggaaaactgcagcatcaaatcgtttcttccattttgttgtagtttttaattttccctccatccaaagggtttgaggtgtctgagaagttgaagcatgggaaaaaaaacgaagatatctggtacaaaaaataaaagtcagagattatccgaggggcaaagatggagtagatgttgccacacacctgagctccaggctaagcttcctggcaacaaatgcacaaaaaggaaacaggctgaatggtgtcatttccttctaggttgctattgggtaagctgcagagttaaaattcttagctgactccctgctctgtctcctcaggccaagttgttggactcacagggaaaggtgaccaagtggttcaataactctgcagcttccctgacaatgcccaccctggacaacatcccgttcagcctcatcgtgagtcaggacgtggtgaaagctgcagtggctgctgtgctctctccagaagaattcatggtcctgttggactctgtggtaaacctcagcacaaggcagagaatagggccgcccaggccacatcataggaatttcctgaacacagggtgcccctaagcaggaatcctccatcaggctcagtttaatggagatctcactccctcctctaatagaccctgcctctgacatagctctaaacctaaaatcctcccggtaacatccagccccagtcatggttctaccctctggaatctgatgcaaatgtttcctctaccaaataacagtctcgtgaaatcaaaaggcatcttagatatgcagtagtccaggggtgataaatacatctcagatagtgagtagtccagggatggcgactgtgccactgctcaccactatgacactcatggcagacatcactaatcgatcaaggctctcctttctactgagtctggatgctgacacaaccttggaatccttattaacagggcacagccgataaccaccaccagtcaactatgttgtgccacctcctcccgggtgactgacggggaaattgaggtccagagggggaaagggttggtccaacgttatgggaggatggcagaacttcagggcagctgacagacaaccaataaccaagctctcaggggactgggatggcgagaaaatagggagtggtcaccaactagcccattcatgattgcagtaaaaatgaaatcacctctctatgtcctctgagatcaggaagctgcccccagacccacaaccatcaccagcccacagtaaaagtccaggccagcaggaccccatgccccatagaagctgacctaggggctgtttttccaccaatgacagacacatggcttgggtcactgggcccacccagcttttctggggtcctgggaaaccttcctcccagcagtggggtgcaggagatgtgcctccctgtgccctccaactgaccttctctggctcctctcaccctcagcttcctgagagtgcccatcggctgaagtcaagcatcgggctgatcaatgaaaaggttggtctgtttgccatctgcagcttgaggggtgtttgctgtggtctggacacaggcctctggggaggagaatctagtgggactagtgtttcattccagcactgggacactcaaaccgcatccctgtccgcacagagatttcagtctagcaggccagtttgacctgaagcaaatcatcacatggatagtatttccattacagctgcagtaacacaggacaggttctaggggccatgagaacactctgggcccctgatacagtctgggacgtcagggaggcctccctgaagggaagggcattccagacagagggaacaggagaccaaaggctgccaggtagggagaacaacacaacattcaaggatctgcaagaaggacagggtggctggaacacgtgagggagcagggagcccaggaaggcaggcaggggccaggccacacacagagcctgtgggccatggtgggcacttgggaggccacatgtgggtctgatctccttccaggctgcagataagctgggatctacccagatcgtgaagatcctaactcaggacactcccgagttttttatagaccaaggccatgccaaggtggcccaactgatcgtgctggaagtgtttccctccagtgaagccctccgccctttgttcaccctgggcatcgtgagttcagttgtctgcgatattggcagcaaccagggggacccttctgtctacttttcctgttcgccctcttgctttgttaaacatttccaccactctcatcacttagcagggacaggggacagggagctctgaaccaagagccaggagctttgtgggtccaattctaaccctgtgactttcttagtcaggaatctctggacagaaactcaactcatatgcacaaaaggaattgtattagctcctataactaaaaagtctagatgctattgacttcgggaatagctggacccaggtgctcaaacaatatcctcttcattctcctctctcccacctagcagccttgttttcctctgtgctgccttcatcctcaggcaagctattccctcatggtagtgccccaggctgcattaggctcatatcctatcagcttggcaatcaccgcaggaagaacctatctttccaatagttccagcaaacatctcagggctgactctcactgaatgagcctgagtcagttgcccattcttgagccaatcagtgtgtccagaaaaatggaatatgaaaacttcctgagctgggccacctacacactagggtaagggagtgagggctctatgaatagtggctgctttcgtcgtcgtcatcgtcatcattatcattccccacagcaagcctagactgtcatctgttaaatggggagtggaggcaagtactatctcatttaacagatgaggcaggtgaggcccagagaggtcaaaccctttgccaaggtcccagagccaggaactgagattcagaccccagagcctccctgcataacccctaattccacactcggatcctcttgagaacaatggggcctgggcttctcttgttgcaggaagccagctcggaagctcagttttacaccaaaggtgaccaacttatactcaacttgaataacatcaggtaaacacacaaatcatcatgaagattctgctgatggaaatgagtcccgcctggtaaccatgggtttctttaaacaccgactttgtggctgtcaggtgaaggcggctccagggtaggcagggaggtccttccggatgctcctgctgacaaggactgcatgtgagggaatggggaggaaaatgaagtaggccttgcagcagccacggcacaggcaaaccctagccgcggccagcccactctggacacctcccaggccgtggcagtgacagtcacccggcacagaagtgcagggctccagctgcctcctgcaccctgcctgttctccctccccgccactttcctgtggccccagagtgagtgcaggggctgccagctggagcctctggggacaagtcaggcccagggctcttttgatcagcccacatagggctgggctgtttaatataaatgagttgtgcacatatcaaatcagactatctggctgccctgtgcccacaatcctacatagcaacaaactgtcgagccaggaattggggcgccctttgaaggagcttgggcctccttgtccaccacagccctgactcctgaggttgatttttctgctcactggactgctatttgttttctgtgccccctctatgccccccaccccacccctgccattagaatgcaagctccacgacgcaagggcttcatgtggttcactggagcccgcactgtgcctggcacataataggtgctcaataaatcgctgttgaatgagtggatggtgaatgagtgggacttcaggggccgctctcacaggcatcttccattgcagctctgatcggatccagctgatgaactctgggattggctggttccaagtaagtgttaacaggtggtgcctgagggcacagggggtggcctggaatggtccactctcaaaacagatattgcccaggatttgcttcaaacaaggtccccacagaagcaccatggggggctggccggtctccaccaaagtccaacttccctcgagtgtttacagagaagccaccacgtgtcagacacagctgagaacacacacacgcacacacaaatacactcacagatacacactttctttcagtgaagttttgatcctgaattagaacacaagtgcccttgactcacaatctcattctgcacacgtagacgcgcctcagtgcccctagacagccctttcctgctgggattcagaccgaaccccaatacctcagtctggcgtgttttctctggtttttatgatttgtttttcactatttttgactttttttttttttttttttgagatggagtctcgctctgtcgcccaggctggagagcagtggtgtgatcttggctcactgcaacctccatctcccgggttcaagcaattctcctgcctcagcctcctgagtagctgggactacaggcgcccaccaccacgcccggctaattttttgtacttttagtagagacagggtttcaccatgttagccaagatggtctcgatctcctgacctcatgatctgcccgccttggcctcccaaagtgctgggattacaggcatgagccaccatgcccggtgactaatattttaaaacacggagagttccacatgcaaatcaggacttctggcttccctccagaagtcagaagttcaggcaatgcagggcaaaattccctcagggcaaattcagctgcaacagagtggtggggcccctgaggatggggcatcctccaatgcaccccaatccccccatctaccaggccccaggggcggctgagttcatgccccaacccagcccatctggtccctgggagcccccacagctctgatcagcaggggacctggaattcctacatctccaccagccacctcacccatggggaggagccacacccacgaagaatgatgggggggaacttcagatgctcaaccagggtgacagtgccccttctctctctcacagcctgatgttctgaaaaacatcatcactgagatcatccactccatcctgctgccgaaccagaatggtgcatacctctgccatctgtgccccctctctccccagggcttggctttacttcccctgccctcatctccatgaatggggcccctttcattcatctcccagccatccctcagagcctacttcaaaatctgcctcctcccaagaaccttctcagcccaattcctttgctagtgccagaggctgggctcgtaaagatgaaccaagcagtgggccagacttgcagggctggaaggagacagaggcataagcagacaatgagagcaatgacagaggtgtaagagacaactggaggcgcctcagcagaccctgttccccctcttgctagtgcctggccttggtcaagctgcacaatccttctgagcctcagtttctccatctgtaaaatggggacgtagaagtaccttcttcagaggcacaaatcaggaggtgcctggcacagtcagtgcccaacactctaattcagccccaggttgaatgaggggtgggaagggtttgtaacctatacagttccacctttttaatttctttattttattagactggaaaaatctcaaagtatagaaacctctgctggggataatgggagcccctgatggttcttgagcaagagcgtaagagaatgtgaggactgcattttgtgaggggccagaagccagtgccagaggcaaagggagggtagacgaggctgggtcaatgctggggccagagaacaggcgagcagaggcagagggggctgtctgatcaggcctgccaggccggggctccccttcaggaaccctgagcctgcccctggctgcccagtctcaccccaggcccatcagtttctgaccacatttgttatttcaggcaaattaagatctggggtcccagtgtcattggtgaaggccttgggattcgaggcagctgagtcctcactgaccaaggtgagtgggtgtggccctaaacatcctgccccagggagggcacagccactgagagccctggctgggaggtggggcctgcactccaaccccagcctacaggtgaccctgggcaagtcccttcccctctcagggcctcacctcctcatctgcaagtgagaaggttggctgtgctgaggatggaaccctcctagcctggggtcagtacactttttccacccccttgtcattcattcattcattcattcattcagtaattcactaaatatttttcgagggtcttctataggcaagccatgcttctgagtgcttgaggccaccgaaatgaacaaatggaaaacactcccatctttttcaagcctaccttttagcagaagaggcagatacacaagccctaaagatgtaacatcaggctgagtggaggaaggctgagaagaaaaataaagcaggctcaggaggagagagtgatgtcagggaagggggtgctgtttcagatggggtggccagggagggcctctctgaggaggtaacatttgagccaatgcctgaggaggtgaggggtgagccctgtgggtagctgggagaagtgtcccgtcagagggacagcgtattaggccgttctcacactgctataaagaaatacctgaggctgggctcagtggcttgtgcctataatcccagcactttgggaggccaaggtgggcagatcacctgaggtcaagagttcgagaccagcctggccgacatggcaaaacccagtctctactaaaaatacaaaaattagctgggcgtgatggcgggtacctgtaatcccagctactcggaaggctgaggcagaagaattgcttgaacccaggaggcggaggttgcagtgacctgagatcacgccattgcactccagcctgggcaacaagagtgaaatccatcccccccccaaaaaaaaaaggaaagaaaataaatacctgagactgggtaattcatgaagaaaagaggtttaattggcttgtggttctgcaggctgtacaggaaacacgatgctggcatctgctcagcttctggggaggcttcaggaaacttccaatcatagcggaaggcaaaggggaagactgcacatcacatggcccaagcaggagcaaggggtgggaggtgctacacacttttaaacaaccagatctcacaagagcacactcaccatcacgagaacagcaccaagaggatggcgctaaaccattcacaagaaaccagccccatgatccaatcagcttagaccccacctccaacattgggttctacatgagatttgggcggggacacagatctaaaccatatcagatgtcaagtgcaaaggccctgaggcagggattgttggtgttccaggaaagatgaggaaggaggcccaggatctgaggcaacatccaaggcaggtaacctcataggcctgagatgcatgcatgcacacacacatatacacacacacacgcacacctttatacacctatacacatacatacacacgcacatacaaacacatacacctttatacacatacatacacacacacacctttatacacctatacacatacatacacacgcacatacaaacacatacacctttatacacatacatacacacacacacctttatacacctatacacatacatacacacgcacatacaaacacatacacctttatacacatacatacacacacacacctttatacacctatacatatacatacacacacacatacatattgcacacatacacaccacacacatacacactacacacacacacataatacacacaccacacacatacacactacacacacacatacacacacacataatacacacaccacacacatacacactacacacacaccacacacatacacacatacatacacacacatacacagagacgcacacatacacatatacacacatacacacactacacatgcacatacacatacacacacacacacacaccatgtggccagatggtctcagctcaaggccaggatcatgtccatcttgtccatgcctctgtccccggtgctcagcatggcctggcacacagtaggtgttcaataaatgcttggtgagcaaatgactctccgtggcatctgctggggagaggatctatggcagtgtcaccctcgctcccaaatactacccttaagaagaacagctcacagtcactgtgtgccaggctctggggcatctctccccctctagagtggagccaaaacttcaagaaggcaggggtttctgtctgctttgttctctgttgtgatcagtggctgcacacagtaggtgtttagtaaatgcctgctaactgagatggacaccttactgtcattagctcatgcagaggaggggcccaaagcagggggtgatcaaggcgggtgctaagtgcaaatcccacttctgccacctactgagtgcgtgactttggaaaggggcttttgccatcttcaagtctcagtgtccccatctgcaaaatggagatgacatcaggacctggtgtggcattaatgttcacacacagaccctccaccccgacccttctaagaattctgtatttgtgggttcagggtcatggtcccccggtgccagcagtcaccttatggaggacaaaaccagcataaaccacaaggcaaaaggttaaagaaacctgttttctgacttttcccctccaattccaggatgcccttgtgcttactccagcctccttgtggaaacccagctctcctgtctcccagtgaagacttggatggcagccatcagggaaggctgggtcccagctgggagtatgggtgtgagctctatagaccatccctctctgcaatcaataaacacttgcctgtgatgcctgccgtctggagtctctttgtcccggcacaggagtcattttgcccctggcaggcttggggactggatggctgagccacacctgggtcatgttcaggcacatctgagccaatctgggtgatgtctgggccacatgtggatgatgtccacagtcttgaccacctccctgtgcttcaggaatcagaaagccagctcttcccacctgccttcatgtcagcctcaagaccatcttcagtgggatggcttttagggtgggggacatatgttttgtttatcttggcagtgtggtggacagaggactctctgaacaatgtggatctgggggcagatgaactaggcttggagctctggctggcctcttaatgcttctttgactctgggatgtagtttcccctctgtgggcctcagtttccttctccgtaaaatggggatagtcattgtctctgccttggagggctttggtgaggagtaaatgagagaacagttccagatacatggtagatactcagacaatgtcgtctgtgggtggtcattactgctgttgcctggcctctggagtgttcagccttatcaccaaagtgccatcctgctcagacagtgcatgactgccttgtctttctggcctccctgatgtcagggcgcttgggacagacaatagggtccctgttctccagacctcaggcctgcccagtaccttcagttacacgagggccttgcaggaagggatagggtaggcatcccaggaaaatgcgttgctcatcatgagagcacaaacaggcataagatatacagctcacagcccagaagggcagccagggacattggccaggccaagaggcacacagaggcaccaggccacagccttgcacaaggtgcttacaccattgtcagtgaccacttacccaacagctactgagtgccagggctgtgtggaagttccccacgcatcccagctcccagccaaacagctgcccagtgccagggctatgtggaagctccccacgcatcccagatcccagccacactttgggtaggattttgttccccacacatcacattccattatttttctaaatcatattcaatctgcatttgaactcccattcacaaaggaggtgacaaagtccatctccatcttgcctagggttggactcttctggctccctagggtcatacaaggatcttttgggggcttccagggagcctggaggatggagtagcccctctagtctgggtcccacctggtcctgatgaagggatccctgtcccagtccacgtgaccctgtcagagtcaagtagctcctccaccccagccaagcggggcacagggatccttctccaaaacagcccgagccgtatatcctccgcgtcccatcacccacaccctctggggcttcctgggggtcagcagatacataaccctggcttcctcaccctttgggggagggaacaactctaggacacctgctgtagacaggctcccagctcaccagcgggactgggccccagttgtccatgctgataaccagcgtgctgacacagtttttttttttggtggggggggtgtggtttggggtttggtttggttttgtattgttttgttttgttttgttttgttttttgagacaaggtcttgctctgttgcccaggctggagtgcaatgacacaatctcagtttactgcagcctcaaactcctagattcaagttatcctcctgcctcaacattccaagtagcttgaattatagatgtgcaccaccatgcccggcccaatatgctctttataggttgcctcacctccccacctcacttccacactcccctaccagtgttccctggggtcatctcccaaatcaactacctgcactccaatcctgttctcagggtctgcttctggtgaacctcaatcaagatagccatttgctccaggcaggcactattctaaggatcttccagacctttggtcacgccaccttccccagcgcctgtggcacaggctccccccacacctgcacctgacaaatgaagaaaccaaggctctgacaactctgcaccactcccaagcagcccccaactattaccccacaccacctccttcttctctctgctcctttatcgcctacccacttgggtttccacctcccccaaaaaaagagaggggttgttctcctgtgccagcctcctgatttgggccttgaaacacaaccaccctccatgaactgctgaggctcctccaggctgggaattccacgactccactgccttgctgggctgcgggaggaaaactcctcaatttcctgctgtcttagcagcagcagcaaagagaaaacaccaagagatctcattaaatcatcgtgccttgcaggaattagtactgtgtttgtcttacagatgggagatgaagtaacaaacagctggtgatgtgatggggctggggcgggaacccaggcctcacccactttgccctgagcctcccagctgaatccacagcaggttatagatccaattttctttctttctttatgtctttttttttgagacagggtctcactctgtcgcccaggctagagtacagtggtgcaatctctgctcactgcaacctccgccttcccaggctcaagcaattctcctgcttcagcctgccgagtagctgggattacaggcatgcgccatcatgcccggctgatttttgtgttattagtagagacggggtttcgccatgctggccaggctggtctcgaactcctgacctcaagtgatccacccgcctcggcctcccagagtactgggattacaggcatgagccaccgcgccgggccccagttttctttttcttcaaaataacggtaacaaccagcagcctctgctcccagcacagtgttatctacttcctgtgagttgagcattccccttttacagatcaataaactgaggctcagagagaggcagtaacagtgtcttgcccatctccgtgtcctgcctagggcttcccttttgtggaagacacccccatgaaacctcccatctctcagcagagattagtcaatgaggtaagcatatggaggccgtggggctccggtctttttcatttagagaccagatttgggaaggaaagaagacctcagtggttccactaacaccctgcgccttcctggtgactcaggtgagcagttaacccaagagcttttctctgcccttggcagaaggaagacagcccttcacaataatattgagacccagtttgcagaaatgaaggggacctatcaactcttaaatcatattctaacccaaaaaatctgagattctaaaataagaatatcccatctaatctatgctgccaagtcatattaggttgatgcagcaacttaatactgacactagccctttgcttttgaggttagccaaaacgagaacttcagagctgccattgaccttgtgcttcctgcacagctgctgtcttctagaccccacccttcaggttgggcacggtggctcatgcctgtaatcccagcactttgggaggctgaggcaggcagatcacgaggccaagagatcgagaccagcctggccaacatggagaaaccccgtctctaataaaaatacaaaaattagccagacatggtggcacgcacctgtagtcccagctactcgggaggctgaggcaggagaatcacttgaacctgggaggcggaggttgcagtgagccgagatcacgccactgaactctagcctgggcaacagagagagactccatctcaaaaaaagaaaaaaaaaaaagaacttgcccttccattgtcagcctctctgccccaggtctccagccaaagaacacagtttaacacctgctctgtccatgcctctgagttgtgaaagggaaagacattaaccccaggaggaaaccctgtgaaaaatccaaaatccacctagagaagagtcacacctgccattggggtgcccatactagacagcaattaatgaagccgtcaatgctgacacagccagctgtgcacactcgcagtggggatgccaggattcccacatcaaaggaccctggcacagcagtttggttgggagctaggtctccgagtcttggagctgcgtggcatagtgacaccaaatttctctttcactgagtggtcagacccctctctgggccctgatttcaaatcccagctttatcatggacatgctgtgtgacccagagcaaggtacttaacgtctctgagtctcagttttctcatccataaaatggaagttaaaagaaataactttttgaacacttcctatatgctaggccctgtactgagttgccttaacgaaccttcaccataccaaaaagacataaatggatctatcattcccatgttacagacacgaaaagtgaggctcagaagagaaagccacttgcccacagtcacacagctcctgattgaaggtggcagtttgagcccaggcctgtctggctgcagagaccatgccattggtgaccacgtcatagcaaaaactgatggcttggacaacctagacagaaagggcataggtcctgagactcggcagagcttgaaagtaattttaaaattaaaaaattttttaaaagactatagagaatggctaccagaaggtggaccccagagcccccctgcctggcccttgccacccacctgctctcctccctctgcctcacccccacacaatcactcccgtgggttctatgactgccacatcctgtactaggagcccccgcagggcccctcccgagagctggggtccctaccagggctccacagctccaaggacgttccaaacggaaatgacccactctcaaaatcacagggccccacccgcctcctccctaaagcctgttggtccaggactcagggcctgcccctccagcctcagttttggccagaagccccttgccacccagtgccaagaggacctctccctccactgaagagctcctctgagccgcaagcctggccaaggggctggacttcctgcccgggtacccacccgcctgggcttctgagctcaggttaaaaaagttgtctttctgggaagctggagacagaggccaaggagagattccagataaccccattcttggagatgtaaggccaaggaggtcaacggggcatttctcaaatatttcttgagcacctataaaaacgttgtgaagtggcacacagatttttagcaccaggcgaacctgggccggaatgccggctctgccactcactacctgtgtcaccttgggtaagttatctctccattctgagcctcagtttcatcatctgtatcttgggcctgatatcaatgatctgagaccattggggtgaggactcaatgatgcgatgaagcttgtgcagccctcagcatggtgcctggcacatagtatggactccagaagtcagggtcggtatggctggctcaacccaggaagtggagagggtggaaagatgagtgtgctgtgctgagggcaatgggggaaagagatctgacttgagtgaactgatagagaaaagtgtttgacacagagactgactaagtgctggttggatgaatagtggatgcatttgacatcagcttggaagagcaaatgccacaagcacaaatttcacagcccaatcaatacaaagcagtttgtgtatgcaaacaaacacaaaaccattctctttccgttatccgatttggtcactgttttgaaatcctgtgccaccaagtagcaaaaaactggatactcaaggcaatgccaggacattctaaggcactccagcgtaggcttagccacttcaggggtctcctcgccttgctcaagggcagcgtctaccctctgggtggcttcttcatgggcatggcatggagggcaatggtagctcctctgtgggccctgtttatagtgacatctgccctagagatgtctgcattttggctggtccctgccttgcagttccagaagcttcgtttcctagtggaatgctcctgcccacccagacagcccctgcctgcagattctggggtcccagctatgccctttcagacacgtggcagggctgaggttctgctggtaggaactggtggtacaaatgcagtgtttggaatatttctctgctagctggtaaagatctgtagctttaagccccccaggtgcctaccgctaccacctctctgacacctcccccagaacctctatcccatagcaaactcaagatccagaagcctccagtgttaaaaggaagtgctaggctatgaggaatgactcacacttgtaatcgcggcactttaggaggccaacacaggaggatcgcttgagtccaagagttcgagaccaaactgggcaacatggcgaaatctagcctctgctaaaaatacaaaaattagctgtgcatagtggcatgctcctgtagtctcagctacttggaggctgaggcaggaggattccttgagtctgggaagtcgaggctgcagtgagccaagattgtgccactacattccagcctgggtgacaaggcaagaccctgtctcaaaaaaaagggggaagtaatacatcctttaacctctcacaatgtcatccaaccatattaacagctgttgggcactcactgcttgctaagtgctttgcacatattatggaacatattcctcacaacgacctagaattgtccccattttacagatgagaaaactgaggcatgaagaggtcctgtgacttgctcaggtcccaccctcaggaagtggcagggcccagctttgaagccagcccacgctctggagaagggcactccaggccgagggatccacaagcacaaatgtacagtggcaggaagtgcaggctgtgttcgaggactagcggatctggagctgggggcagaggcaagggaaggaaagctggagagatggtcctaggagaggcagagctgggagatacacagtgacagggccccggtgaggacgtcaaggctcccacctctgtgtctgcaggtcctggccaagagaatgctgctgctctggatgtcactgcttgctggacgctgctgccccaggcccaggggaaggcccagcacctactctgccttcagaggacaagaatcagtgggaaacaggtaaatgttaaggggtgagcgtcagaggcatgaactcaggaaaggccaggggtgggagacggcaccacctccctgctcaatgcttctcctgtacaggcctcccccttgccacagaattcaccttacctcacccagagctgatcctgtctctcccctgctctaacacttgccatggctcctcagtgccctcaggagaacctctgagccccttatcctggcattcaaggccctgcatctccagcctcttccactgcctccttccctgaccacccccacagacttcacagctccctcctgtgctaggctgttcctctggcctgaaatgcctttctctcctgctcaacctggtgcatctgggcccatgcttgaacgcaaagttctaaccacctcctctgggaattcctctcgatttccccaggcagaagggatctctccttcctctgagttcccacagccctttggtgacgtctcctctgcggccttatccaagtgtgctgcgcctgctgtcccatctgtctgtagggctggctgcctctgtccctaactcctgactgagctgtttgtcatccatccagccccatccccgctcgccacgctgcagcctcacttatctttctgtttcctaccacgccaggctcaccagcacctcagggcctttgcacgttctgttccctctgccaccatggctgtccccgagatcagcctgcatgatggattcctccacctcactcaggcctcagctcagaggcctcctcctcagagaggcgcttccttttcaccccatcagaaacagatcttcacccagtcatgctccgactccactgtattttttcttttgcacagatcactctggaatattgccttgcttgctgatctgagtgctcggcttttgtctctctccctaccaggaagtaaactccatgagggcaggagccacactgcttctgtcccttgagcccaggagagagtaagcactcagtaagtgctggctgccaaatgactgagtgaatttggtgaaaggttgaatgaacagtacagccccacactgaagcggggcttgcatcctcggacagttcagacctgttctcagagcactacaccctggactgcatgctcagcctgcctgtgacaggggccaggagcaaaggtgttgctgtcctggaccacctgccctttgtaggcaaacgcctctccaagaagagcagtgggctggacctgtcgcaggtcggtcggggaactgctttcagggaagagcctccccctgctgtgggagctactcagggcaggtggataagtggagggctaggactgcctctggcctttcctggtaccctgagcagctgtgttctcagcacggtgtctttggaggttctctatagcctggaaagtgctaagcaagtctacttttcttgaccctatgtctctccaagctgcttgaaatcttcctaggaagaaagtagggtctcaatctgggacctcagcccggcagccctcctgctccctacactcagcctacaactgggttttctgcaaacctacataggtttttgaaaaatatttttaatgaattgccaacatataaaaatcaagaagattttaatcaaaatctgggtttcccaattgtattagattgtgaggactgccataacaaagtactattaatacaaactgagcaccctggacaacagaaacatattgtcacaggcacagcggccgacatcagtaatcccagcactttgggaggccaagatgggcagatcatttgaacctaggagttcaaaaccagcctgggcaacatgataaaaccccatctccacaaaaaatacaaaaattagccaggcatggtgacgcgtgcctgtagtcccagctaccctggaatctgaggtgtgaggatcacctgagccctggagttcaaggctgcagcaatccatgattgtgacactgcgactccagcctgggcaacagagtaagtctctgtctcaaaacaaaacctccaggtaaggcaagagggctcgcacctgtaatcccagcacttcgggaggccaaggcgggtggatcacttgagatcaggagttcgagaacagcctagtcaacatggtaaagaccagtctctaataaaaatacaaaaatcagccaggtgtggtggcacgcacctgtaattccagctgactgggaggctgaggcaggagaatcacctgaacctgggaggcagaggttgcagtaagccaagatcacaccactgcactccaacctgggcaacagactgagactccatctcaaaaacaaacaaacaaacaaaacccaccagagccggcacagtgacacacatttgtagtcccagcttctcaggaggctggagaggaggatcgcttgagcccaggaatttgtaatgtgattgcacctgtgaatagccactgcattccagcctggacaacatagcgagacaccatctcaaaaaaaaaaaaaaatccgtgctaaaggcagatatacagcagggagcctgacccagaaaagttttcctctggcatttgaatttgttgctgcctcttccagtgggcaccagatgagtcaccagcttgtacctaacgttcaaaaaatacctaaaactcggctcctctcagctcagggaggtgctggtagctgatggtgcagaagggagcagagcagatgggtcctgagcagatggcagagggcttacctgccaccttgccttccctgactctcgctggcctgcttctcttttgcagatgcttacgctcctctactgttccctcccccattttacagaggctgacacggaggcccagagaagggaagggacttgcctgggtcgtcaagccttggagaatggaactagagctcagcgttctacagctgggctgggggcaagggaaggggttgtcccaaagctgctcccacccctcctgggctctgcccctattccagcagatccggatactcacaccccacagagtcacagaggcctggccaggccacaccaacatcctccatgcctctcacaggttggtcatagaagacgccaaaagacctgagatcaccctgcaaatcctaagtgatagcctgctgcaggtcacgttgcgctgcaaactgtacctctcactccaggagtaagtacacacgggcacttccgcatcacccatttgggtgccaggcagaccaacccctcactgccatgaatcaagaggcagccatgcagggctagcaaaagtcacatgcctcatgtcaccacacgatcctttccacttgggcgtgtttcaaagccatttttactgataaggaaactgaagcacggagtgggagaagaacctgcccaggaacacacagtaagtcggtggtgcaggttggataaaaccctctgactttcatgtcaggggacgtgagcccatctgagcaaatgggcaggacagtgtattaacaggattacccgaggaaggtgtggttcaagcacgccttggagtctggcactcctgggctgggcaacttgggcaagaggtgtccattctctgggcttcggcttcctcatctataaaatgggtataattggccaggcacgatggctcaggcctgtaatcccagcactttgggaagctgaggtgggcagatcacttgaggtgaggagcttgagactagcctggccaacatggtgaagccttgtctctactaaaaacacaaaaattagctgggcatggtggtgggcgcctgtaatcccagctacttgagagggtgaggcaggagaatcgattgaacctgggagatggaggttgcagtgagccgagattgtgccattgcactccagcctgggcgatagagcaagactccgtctcaaaaaaaaaaaaaaaagatataattctggtttcctgctgcactaggctgttgtgagagttcacctgcaaaattctgaactgcagctgattggacagaccagaggttgcaaacacaacagccaacagaggcagtgatacaaaccagtgtttgcaagtaaaacagaaatattcctaaatgccctttaggaacgtgtccactcttgtttttcttgtaaaatttggctctcttcatctagcttccacctttttttctttttttttatttttttcagacagaatcttgctctgttgcccaggctggagtgcagtggcgcgatctgggctcaccacaacctctgcctcccagattcaagcaattctcatgcctcagactcccgagtagctaggatcacaggcatgcgccaccacacccaggtaattttttttatttttagtaaagacagggtttcaccatgtcggccaggctggtttcaaactcctggcctcaagtaatccacccgcctcagccttccaaagtgccgggattacaggggtgagccaccgctcctggccaaacttcccccttttaatagagatgtgagtacaaataaatatttctttgatagacacgtggacacagagaaatatttctctgcaatatggtaaacatatcattccccttgtagggatagtgcagtaaaaatggaacctgaccactggcctggtggggaccacagcaaactagagagcacatggcccatctcaaggtcaccctcagccccagatgtttgccactctgtgagaccaggggatccagtgttgtcagatcatctgggttttccatatttttaatgaatcctcctagtttttaatttgagcccttcaggcaacggcaggctatcagcttgtgacctctggcctcaactttgggctccgcactttcatctgcccaaatacactgtccctacaggatcccgtggctcaaagtcatcaagagcattcacattggagtacggctggaacagacagggaataccaccaaggtggctttcgaggagtgaggagtgccacagcccacctggacacctgagcactgaggctctgcagcagtgagtatgtgcctgctccaaagcttccactgggcaaggctgcgtgccagccctttctttctttcttttttttttttttttgagactgagtcttgctctgttgcccaggctggagtgcagtggcacaatctcggcgcactggaacctccgcctcccaggttcaagcaattctcctgctcagcctcccaagtaactgggattacaggcacccaccaccacacctggctaatttttgtgtttttagtagagacagggtttccccatgttggccaagctgctctcgaacccctgacctcgagtgatctgcccacctcggcctcccaaagtgccagtattacaggcgtgagccgccttgcccagccagatgccagccctttctgcactgatccttcactgaaactccgggctgggactgcctctccccagctagttgtctggagtggccggagcaccgggaacagggtcatctccaaggccacagatggtacccatcagcatctccttcctccatgtcaaatgtcattgctaagagctgaggttcaagcctcagcttggacacttcctaacaatggggcctggccaagttatttgacctctaggagcctcagtttcctcaccagtaaaatggaatggctcacagtacccaaccagcatggctggttgtgggggaaaaaaatgagctaacccatgtgactcacttagcacagagcctaccacataaaatggtcacgatctatcgttcttatgtttacccaacacaaaacctccaagaatccttctatgaccactgtcaggtgtgacctctccctgctcagaaattccagagacctttatcagaaagagaaataaagagacagaggcaggtgggtgccatggcttatacctgtaatcccagcactttgggaggctgaggcaggtggatcacgtgaggtcaggagttcaagaccagcctggccaacatggtgaaaccctgtctctactaaaaatacaaaaattagccaggcgtggtggcaggcgcctgtaatcccagctacttgggaggctgagcaggagaatcatttcaactcagatgcagaggttgcagtaagctgagatcacaccactgcactccagcctgggtgacagagcaagactctgtcaaagagacagaggcagagagagaaccaggaagaaataaagagaagcaggagaaaatcagggagggagaaagcaagaaggcaagcagaaacagaaagaggggaagagaagaaagaaggggcaggaggaggaaggcagggaaggagcagccactggagcccccatgccacacaggcctagaggggcttcctcaaccctgccctgactcgccctcctgactgcagtctgccagccatggtgtgtcagaccccaccagccaccctctccacttcctctaggatggacaccctcctggcaaacaaagcccagctcctatccactgctccttccccatcctgatggaatgacaggaggtggatcgggaggacgggaggcttcgagtggaccggaaggaggcactgtaaacaaaggcgcagagaaggaaatgggccaaacgagggagaagcagggaaaccaggctcctgggtccaaagcccagctctacctcttcccgtgtgcaggatcttgagtaagtcacttcccctctctgggctttagcctcctcatctgtcaaatgatgacaatgacagttcccatcttgtggcactgtcgtgaggttcaaatgagattgtacatgttgatgtgcagggctgtgtctagcacatagcgagcctgcaaatatgtttgctgtaaccagttgcccagggaggcccttcccactgaatttcttcttccttcatttctatgaagcttgtggccccctgcagcccgggccagagagcctcaaggcctgagcacctggccccccagcccttcccaacatcagcccagggaagcgtggcagacctgctcttttggctggaagtctacaatgacatctgttctgcctccacaccagcaaggagttccacgtggacccccaggactccacagtgagtgctagaagaaggggaaaggggcggggagaactattattgctccatttttcacattaggaaaccaaggcccagatggggaatatgactggtccaaggttacgtagtgggtaggatcagggctacagccagatctcctgcctccccgctgggctgtccatcacacacaggaatggcagctctgagacagtcagaagtgagcctgtcattccacatctacagaaattcttacaccagtgggcaagggcattctttgtattttactagttatgtggtgaaaaataaatttaacttagccaggcgtggtggtacacacctgtagtcccagctactggggaggctgaagcaccagaattgcttgaacctgggaggcggaggctgcagtgagccaagatcataccattgcactccagcctgggcgacagagtgagaccctgtcagctttgttgtatgtatagacattttcataataaaatgtcaggagaaaaatcattgaaacaatacaaagttaacctgtccagataaatcatggtgagaaacctcctcttacgctgggacggaccagtggcaggcggtacatccagtagttacagctcattgagccccactgagctccctccccaaccagccagctcagagcccgtctgcaggattttaaagaccaacacacactttgccccttttccaggctgcagacctcattcagctattgtcacggattgagctggagcccaggcccagggtgggtgtgttgccagctcctcctccagaagcccagccagggtctcaggggagattctgagacaggagctgggccaggtcaggccacatgggcgtgttcccttaggccagggtttcctgccgtggactccaaaaatcactgcacctgctacacaggcattgtgaggatttaatgagatgatgtaagtaaggcacttagctcagggctcagctcaggtgaccatggccctgtgcctgccattactattcactcctgaataagacccaagcctgctggggggacacctagataatggtgggcagtgactgtacacaggtccctcccactacatcagtgcaaccctccagtaaccctgcactgtcacccccttctacaggtgagcaaactgaggctcagcaaggtgagctcactcgcccaagctcacatcgctcagtaaatggtagaaccaggattggaaccccgtccctgactccaagatccttgctcaatgtcctttctccaaagtgtttcagaacagagcccctgatagacaagcagtaacaataaccacaacagctgacaagtatatggcagtactaggtgccgggttcttttctaagcactttatacaaattaactcattgaatcttcacaacaacctctgggctagttgcaattattatccctattttacaagtgtgaaaatcaaagcacagagagattaagaaacttgcctcaggccacacagcttcccagtggtggagctggaactccggttccaaaactctatactcttacctgctatgtatgttcaggagaaggaggatgttatcccacctccaaaaagcccagggagggtaagtgacctggccaaggtcacacagcaagttgctgcagtgctagaacagaaccccagacccttgactcctaagatagccttgcccccgttcttccaagctgggagctgaggaaagccatctttagtcaatgcctgcaccttttctgctgtaatttcacccaggcttccagtcagtccagagggagcatacaactgaccatcaacacccctgatcctcccacggtccgccttgacggccacacggccaccatcatccagccgggcttgctagtgctactggggctcagcatcacctcctctgtctcagtttcctgggtgagtgtattagtctattttcatgctgctgataaagacatacccaagactgggtaatgaaaaaggggtttaagggactcacagttccacgtggctgaggaggcctcacaatcatggcagaaggtgaaagtcatgtcttacatggcagcagacaagagagaatgagaaccaagcaaaaggggtttcccctgataaaaccatcagatctcgtgagacttattcactaccatgagaaaagtatgggggaaattgcccccaggattcaataatctcccaccgggtccctcccacaacaggtgggaattatgggagttacaattcatgatgagacttgggtggagacacagccaatcatatcagttagtgagacgcaaaggtctttgttccctagggggcctgggtccactgtgagaacccctccagggccagcgagctgtgcctgctgctaaagtgttaaaatactttaacacctgcacccctttgttcacctctggtgctccacaaggacctcagcaactaaaggattctgcctccaagaccctcagctcggagcccttgccaggtggtggttaagccctttgactgcctcccttgggcgtgatggcatcaaaagccatcacaggaggaagtccagaggcctggagctcatggagcgctgcggtgtttctccactcccccagagagagggttacccaggctagagagggcggggccctgggaggaaatctggggaaatacagcctcccaaaagtttcagcttctctattctgagcccccttgggattcctatttcccgttccacggactttgaagttgagaaggtgcctcaaataagcggtcaggagggtccccaccatgggtgagccacatggcatccatggggaaacagtatcctggggtcttagttgacatgattctgcggcaaaaaaacaaacaaacaaactggtcatctctggcttgtgggaatcacttctcggcctttcttggtgaagatcatgtatctggctggtggggtaacatcctatttctggcttataaggtgatcgtgtgagttacggaggcccatagacaaccccctcaacaccaaggggtcctctggcttcaaggcaacagtaattctagagccaagtgactctcattacaaaaggctgtccctccactgggctgagtccctccagctgtgtccagccctggccccactgccatccaagagcacccagcacccacctgtgcccccacccccggcaaggcccacacatgcctggtctggatcaacatgaaccagtagctggagaagacaatgacacagggtgggggtgagggccagatgagaagggaccaagcccgaacaagcattcctgggggctgggggtcaagggggtccctccggctagaacacaaattcttctcctgttctgacctaatttcaattcttcatagaaactttttttgaaggctgcattttccctaagaaatcaggaactacatgaccgggcatggtggctcatgcctgtaatcccagtactttgggaggccaaggcaggcagatcacaaggtcaggagatagagaccatcctggctagcacggtgaaaccccatctctactaaaaatacaaaaaattagccaggcatggtagtacacacctgtaatcccagctactcaggaggctgagacaggagaattgcttgaacctgggaggcggaggttgcagtgagccgagaccatgcccctgccgtccagcatgggtgacagagactctgtctcaaaaaaaaaaaaaaaagtggagtccccaggactgctgatcccctgtgagcatctgaacactggtgtcccatccttcctcaggccagaatctgctgacccagctgaaatgtccttcctgttcctctgtcatctgttgcaggaaggacattcaggggcccttctcttacagcttttgaagagggtgtttctgcccatcacaacagtgatccccactttctctgtcacacccacataccatactcagagcagcattaaacatctccaagacagctgacttctgcctggggttggctaaaaactgcccacaggtggccaggcgtggtggctcacacctgtaatcctcccactttaggaggccaacacgggaggatcacttgagctcaggagttcaagaccggcctgggcaacatggcaagaccctgtctctacaaaaatatttttttaattaaagaattgcccacaggtaaggcagaggaggcagggtagagatgctgaaatccggggagtgtcatatgagggggctgcggaagggaccatgggtgccctcctattcttcacccggacagcaagcaatgatggaaggttagaactgggacaagtgcgcagggagggcttctcgaggtgggtggaggttggcatgatggaaatcggaatggaaaaggccctcagaggtgatggcacccagagctcacatctccaacacctgcaggggcaggcgggtaacacccaggtgaagaggcccaggtggggcctttggtgaacacgaccccgcccagtgggcggctccactctgctcagtcgaatgttctcagcacagcagaaccgcagattatctttaagagacaccagaaagctgaactttctgagatttcacccccatctttagatatccgcaacaaacctaaactcttccaaacaccattgccttggtttgggctccctcagaagcagactctgagctggggaagtgaaggtggcttcgggggaggtgatgccaggaagatggagggaggaggactgagtgctacgagtgtgtgcagagcttctctgctccgtagatctcggggcttccgacacggtttgtgtaacaatcccccatccacccatgtgatgatttggtgagtgcctgtgtccccagccagacagtgagctgccccagggcagggacccctcggtttcttgttgcatctccagcaccctgtccagtacctcgcatgcaggaggcactcaagaaatacatgcaggagaaacagctcagacctcactcatccgagaagtcacctgagatccctccccaccaggcccagagagattaagtgatttattcaaggtcacacagcaagtctgcagagctgagcccagaacactggcttccccaacagagcttctccctgagctccgactcatgttgggacttagagtgacactagaggggccggcaggtaatgacaattaggccagcaagggggtatcggaccctcccctgagctctaagtgatgatgtgggcatgggttggggcaaaggctggtcagcgcaggagagggagcaggaggggcccaggccaggcccccaaggtcaaatctgggagactcagtttgccaaaaatcaattcccagccaaatggctaactcactgaaactcaaattgcaaaatgaccaattctccaagtttaccaaatttacccatttcccaaaatcttgctttaaggataatgtttcatgtattttataagcatttgtgaatatttccttctttgatatattcaatggatattttcttattaatatgaccaaatttctagtgttttaaggttaattttttagtttattccgacttgtttctaatcctttttttaaggacattttctgtttctaccaacattttagcatttttcgggggggagcatatagtgtttggggctattcccctcaattaaaaaatagcaaaattcactaacaggtttataagaatccttcaacaaagtgaacattccttaaaatgttgctgagaagaatgtgttcagtcactgaataggttcaaggatttcccttaataaggttcttagtaaatgggtggagcagccctttagagaccagctttcccagctggagctgcttgctgttcaggggctgcctgatgggggatggagatagtccaccctgagcaggggtgggggaacacaccctgtcccttccccattctgagcagtggagcagccagggaccacctctgcccaccagggcactgaggtcccctgcccgcccctctggcagagctgctcagagaacacagcctccctgtgcccaacatcaggggtccttccaccaggcccaaagggacctctcagaggtaagcctggggaaaaagagctgcctgagacgcacatgggtggtcgtggctataagtgactttgagccctagaggtgcctcgtctcatcctgcagaagaagaagctgaggaggcgcttgtgtcccggccctcagccttcttacctcgcctcctctcaaagccatcctgcatgtgactccccacttacagatgaggaaactgaggctcccaggggctgcacgagtcccgcagggacccagaccacagggctcttggagagcatcaatgcccctacacaaatgaccttcacaatgagctccatgaagttgatgctgtaattccctcccacttaacaacggagggaactgaggctcagagagtcagagaaacgtgcccagggcagcagaaccgggatccaacaggggttcatctgacttcaaagtctgtacccttagccccaaccacccacctcccgagaactccagaccccagaacagggctgttgcctctgatgcctgctgtctgtgaaccgcagagggtggaaaccagggcctgcccaagggcacccaaataccagggaggcaaaatgcagcagagaccagagggtagaggaaaccagcgaaggaaccacagaggaacccccaggagagtttgccagctctgaatctgcccctggagctgccctgcctgcccagccctccttccttcccactgtgggctgaacctgagaagaggtggacaggggtcaggggaatgggcgggtcttagagatgcccttcatttctttaactcccacctttaaaagattcccatctgtaaacagcagagcaggagggaccaaggcagagacaatcatacggaacctcctggctgcatgaccatgggcaagctgctgaccctctctgagcctatcgttcatatctggaaaatggggataaagaaaattctggccaggcatggtggctcatgcctgtaatcccagcagtttgggaggcagaggcaggtggatcacgaggtcaggagtttgagaccagcctggccaagagaccagcctggccaatatggtgaaaccccatctctactaaaaatacaaaaaatgagccgggcatggtggtgtgcacctgtagtcccagctactcgggaggctgaggcaggagaattgcttgaacccaggaggtggaggttgcagcgagctaatatcacgccactgcactccagcctgggcaacagagcgagactctgtctcaaaataataataataataataattctccctaggagctggaagtcagggctctccttacaaacatgaggaagtgttaggaccactgtcttcagccagccctgctcaggcacttaacagaactcaaccctaatcccacacagagagaccctgcgctgcacaaaaggaggcagcaggggccggcagcagtgtgcctcatcaaaccctgcttccagccccaccctgcagacccctttcctagattcagcccctggtgtccctagtagggaggggaggcccagacgcactccagtgaggaccacaggggccactacagggcctgcaaggcctgggctgctccaaaaatgatgctgcaaatcctggccaggtggacccgtctgctcagagtgcacccagcgtgggcagggcccacctgtgctctgaatatcagagaggagcagagtcaggacccagcctgagccttgaaccagccccagcagctgtctcctaactggcctgtgagaagcaaaggaaaagaaggcaaatgagctcattggcttactcgccgagttacctcccggcttccttatgctcttgtgcaggccacacatgacacaactgcagggtgcaccacttgtacagtagtttacatgaacaatgccacctggagttgggcagtgcacaacctacacaatcttacatggctgccctgatgacccactcattcattcaccatcactcagtcagtcagtaacctcactgactgctctgtgcctggcccggtgctgggcaatgctgagacaaaaagatgagttagactcagccccggaaccctccaggagctcccattctggtggaaaacaataggtgcaggagcagacagatcccagcagcatggtcgggtctggcagaggtttgggcattgtgggtggcaatgcgtgagaggctctagctggtgaggggcccacttcagggcgacccaggcaggacaaaccccgacacagaaatgttagagggcccttgacacataggctctcaggaagagtcccagagtctgatctgttccttccctcacaagctttcctgagattccccctccccctcctttctctccccttgtccaggggtccctaactctgccctcttcatccaggggaaagtgtatccttaggacacacacggcccctctaaggtgtagtgggagcagcctcaggcagagctggtattttgggcatcaaggacaaggatggtggggaacgtgctctgcttctacccacaggattacctgctgctggccattctgggcaagtagtggcttctgaccaagagccagtccaccccccgccatgagttttccagcccctgatggcctgcaaagggccacagtgttccaaaacctcagctgcaatacagagggttcttgcctgagcaagagtcagttctgagtatgctaaggggttctgtgaggaggggagactgtcttgaaatatttaaatgcgggctttttccccctgatatttcttggcttcccgtggcccctgagaaaggaattctgaattctatattcagtgtctccaggaagggagagttcctcagaaaatggtgaagaggtgtttgagtttcaaaagtcccagccctgacaggatagggtgtggaggggacacaaggaaccatgcacaccggaaagcctcgctgatggagagggaggaaggaagcaggaaagatgaggggcttgggggtctctaagaaagcgggaaccacagaagcccagagacgcttgggagaccctgagtgcggaggaaaggagctgagggaggcggcaagacccccaggctgggagctgggtccaagtgggtggtcatgagacaaccacaccccagagtccccaggcccacaaggcatggcgcacgctcaagaacagtgccatcgtggacgcgggcccaggacacacacatgccccgccccagctcccctcgcccacgtggccctggcagggcagggcagtgaacagaaaaagatcccgccccagagtcaaaacgtgcacggtaggtgttcgccggggcagagagaaggcaaagcacagagcgccccacccacaggcacctgtcgctgtccacagcaggtaggcctggccccaggaaaaggcagatgaggagaaacttcacactgattatgataaaatccctgggagcagcaggatggaggctcgtggcagcctctgtcttgggagtgagcaagcattcagctccctggtagccctggctggcctcagaaaaccagagtttcccgggggcccttcaccaccacacagcccaaaccatggaggctttcatgggtctggggcaggatcgctgtcccgcagcagaaggttggggttcagagcgagcctcgctgtgggttctttacgtggctccctgatctgtttcatttatgaaccacaagcccaaccttgaagggaaaaaagaccccagtgggcagccccagaggtcttgacctagagggcaggaccaccctgcacatgaacttgcaaagtctcccagcccttggtgtgcatatatgacacgactaagattgggtggaggctggaagacaagctgaaccctcaccccaagcccagagatttcccacccatgtgtcagctcggtgcccagcacatggtagatacttggtacaaaatgcttgaatggagaattccttgggaccttgaagaagccgggcaggccttggcctcctcagccaggatggcctgtccaggcaccggcaagcctttcccacccaccacgaaagcccctcgatcccctcccaagatttccacagatgcatcttccacggtgcatctcactttgcagtttgcaggctcatgcacccatcttcccatcagatcttcagataacactggctggtgccagacagggagtgtgattattcctatttgtaaggtggtgaggaccacagatggataggagggtgggtagatggaaggatgggtagatggatggtggatggatggatggacgaatgaatgtaaggatagataggtggatggtggatggatgaatggatgggaggatgggtagatggatgatggatggatggatggatggatggatggatggatggatgggaatgtaggaagatggatgacggatggatagatggatggataggagggtgggtagatggatggtggatggatgaatggatgggaggatggttagatggactgtggatggatgaatggatgggaggattgggtagatggatggtggatggatggataggaaggtacgaagatggatggtggatggatagatggatggatggataggagggtgggcagatggatggtggatgaacgaattcatcatcactaatctagccccactcccagctgagacacacagtcgctggaaccaagaagagaggcaggggtcaaggatttcagattccccatgttcatacaaatatttttcagaataaataactcttacctatttattagagcaaagagctcttctaagtgataccttaaaacaaacaaaacctagtttgaaatgttacatggaatcaaactgcttttttatccaaagtaaattcataattcagacatttcactaattgacatcttcctccacaagatatccaagtgcttgaggtcaacaagagcaagccaaatctcagatggatcaagaatctcgaacatattcacattatttgaaatgcatatgattaattcccacttctgggaatttcctaaagaaataatcagagatggctgggcgcggtggctcatgcctgtaatcccagcactttgggaggccaaagtgggcagatcacctgaggtcaggagttcgagaccagcctaacatggtgaaaccccatctctactaaaaatacaaaaaaaattagcctggtgtagtggtgggcgcctgtaatcccagctacttgggaggctgaggcagaagaattgcttgaacccaggaggcagaggttgcagtgagccgagatcatgccattgcactccagcctgggcaacagagcaagactctgtctcaaaagaaaaaaaaaaaagaaaaagaaaaaaaaataatcagagatgcagacaaagatggttaccatagcactggttttatggtgaaaatttgagaacaatctaaatgtccaacaatacaagatttatttttatgataaattcctaataaaaaatttgtacaggcattaaaataatgttttaaaagagcattcataagaaaatacaagaagactaggatacaaacctatttagagatgatctgaaaattaaatgtacatatataaaataaatgagctgggcacagtggctcacacctgtaatcccaacactatgggaggccaaggcaagcagattggttgagctcatgagttcgagaccagcttgggcagcatgatgaaacctcatcactacaaaaaataccaaaaaaattagccaggcatggcggttcatgcctgtagtcccagctactcgagtggctgcgatggaagggtggcttgagcctaggaggcagaggttgcagtgagctgggatggcaccactgcactccagcccaggcaatagagccaggccttgtctcaataaataaataaactcaaaatgtaggctgtgattgtcagacagcttgagtggtaggatcgcaggttacttttattttattcttaatactgtttccaaaacttttatggtgaacatggttgacttttatgattgggggaaaatgttctcattcattcaataattgtagggataggtatcgacactttgtgccacatgagcaaaacacagcaagaatggtttctgccctcacaaaacttgtgatggagacgttaaataacccagccaataaaaagacaaaggactacaaattccaatgagagccaagaaggaaaactacagggtgccaggagagagaagaatggcagcgtggccaggcacagtggctcatgcctgtaatcccagaactctgggaggttgaggaaggcaatcacttgaggccaggagttcaagaccagcctggccaacatgatgaaaccccatctctactaaaaatacaaaaattagccaggcgtggtggcacttgcctgtggtcccagctactagggaggctgaggcaggagaatcgcttgaacacaaaggcggaggctgcagtgagccaagatcgtgccactgcgctccaggctgggtgacagagtgaggctctgtttcaaaataaaaacaatggctagggtagcctactttagaagaggtgaccggggaaggcctcttgaaggagaagctgttcgagctgagacctgcagtgtgagtgagccaggtaaaatgtggaggaaagggttctgggcagtgggaacagaatgtgcaaaggtcctggggtggaaataaggtgggtctatctgagaaactaacagaaagccagtgcagacagtgaaataagcaagaaatggtaggaaatgaggttggagaggcaggcagaggtccaactgcacagggcctcaagggctaggccaaaaatatgggcaccattctgtgcggaatggtgattcactattttaagcaggagagtgatgtgatctgaatatgtcagactttttttttttcttaagagaaggggtctcactatgttgcccaggctggtctggagctcctgggctcaagcaatcctcctgcctcagtttcctaatgtcatgcacttttagaagaaaagagattgagccagagctacaaagctacagactcccagagctttgggggaaatccagtgctgttttattgtgagacatcagggatcaaccctgagatgttcaaaccaactaccctgagggagctcatatctctgcccagtgttgttctgaagagcggtggagacaggagaaaggaaggctgaaggtggagggaactccctgcctcacatcagctatcactttaggcactcagagccactgtcttctctgattcccataagccccatcaaagagaagcagacagggacttgttagcctatttgacagacagagaaactgaggctcagaggagctggccccattcattcgtgcattccttcattcatgcatttactgcacgctaggtggagacagggatgtgcaagacgagtgagacacgccccagccctcaggcatctcatggactatcggatcaagaagacaaggggcatatcctgggaaaaggctttgctccagacatgtctgcctttgaatctcagtcctgccacttctgcagagaagtaacttctctgaaccgcagtttcttcacgtctaaatggggaaagtggtgatgctgctgaggaggaggacgggggaggaagaggaggaggagcgaggaggaagataggttgttgtaagagtggaaagcatttgctgagtgctcagtagtgggattttggaggttgtgggcaactccttctgacccaagttttagtgtgatttccatgacacaccctgtctctccatcctgggcagcgttagttctcccttatgtgaaacccaagctggctgagcccacaggcaaatgcagccatagtgacactggagctattcagagccaacctgttgcccttctataaaaagatgcccactggcatcctgaacacacgaaacaatgtgtacccagtgggtgcaaagaggcagggggtgctcagaggagaagcagcagaaccagagtgcccataagccacacgtcctctgggaaggaagggaaagccctcttgggacagacacactcaattttgacttacaaagcagaaaccacaggcctaaccctgagtattgacatctgtgagcaagtggattgaaaagaaacagccaaaactgaaacatctgcaaacacgtcttaaatacagtacttcgctttgaaacctcttacacatttgtgacaaggtttgttcacatatctactttgggagcatgtgcccagaaaactttatacccccattgaaaatgaaacttcaggccaggcacgacggctcatgcctgtaatcccggcactttggaaggccgaggagggtggatcacctgaggtcaggaattcgagaccagcctgggaaatatagtgaaaccttgtctctacaaaaaatacaaaaattagccgggcttggtggcctatagtcccagctacttggggggatgaggtgggaggatcacgtgagcccaggaggcagaggttgcagtgagccaagatcatgccactgcacttcagcctgggtgacagagtgagaccctgtctcaaaaaagaagaaacttcagagtgaggttaaaatgtctctataccggctttctgtctagtaaaatcattctaaatgatccatttttgggaggagataaagaaacataaccccccaaaatccatattttactgtttcaaacaaggtgtaaatagttgtgaaaatctagattctgtagataggagaatggcataaaatcaaagacctgagcgtggctgatgcaatagtagataatgatgatgatagtagattatggagactcacatatcctaggcagggtgacatatttcatcttgtttaatcctcacagcaaccctatgataggcatgatttcatccccactttatagatgaggaaactaaggaacaaaaatattagataatatcccaaggccacacagccaggaggcagcagaaccaagattcatatcaaggcctgtctggccccaaactctgtgaccagaaactctgccttttcctaaaccattggttcttcaccgtttatacatcacaaggcccatcaagaatctcattaaagcaacgtggggatatcattgagcccaggagtttgaaaccagcctgggcaacatagtgagatcccatctctaccaaaaacataggaaaaagctagctgggcatgataacatgaacctatagtctcagttaaggtgggaggatggcttgagcccaaaaggtcaaggctgcagtgagctgtgatggcaccactacattccagcctgggcaacaaagtgagaccctgtctcaaaaaaaaaaaaaaagaatctcattaaacgtatctctgagaagtgaacattaacaccaaattttatatgcaacttcagagggtccagggacacaaactgcctgcagtagccccccgtgacctcgtgtgactggcagagatctgacactgattacgccagaggactgagccaaggaaggcaggccatggcctccgagttccaggggcctagacagacacagacaagcacataaaaagataaaagcataaacatgtatgcagacatgtgtgcgtcactaaagaatccttaagtttctgtccctgggacatcctcggctcaacctggcctattgtgatctcctcacacagaggctattaagagttggcagactgcattatcactggtcattgtgatctcagccaagacttggccagccttgaaaaggacttcccttcaaagagtctgcaggtcaaatcgcttagggctcagggacaaactggccgttgttcccagctgataagccaccctatgtcacgtaatccaccatggggaccctggattagcagaagtcaatggctgccccacctcctaaagttgaagaggagagagacaaagaagcaggaagccccgaggcccatcagaggctgcctcccggatgtgccccttccccttcatgacctctgcggttgggttcattgtttgggttcagagaatcattcgaggcaccaaactcaagggccacacccaccaatgggtggcacaaatttcatctcaaagatgattcaatttccctcaaatgtccaagaaaaataagacccaggacagttgagtttcgtctcctacttatcatcatgaataaaactctaagttctgccctctgacatttgatgcaaaggtctacgtatctaatacaaaggtctatgcactgtctgttcagcaatgtccaaagtggggcctttgacaaatgaaaccgtagttgaggttcatggcatgagaacctcagtggagctggagaggtcctgcagcctagggaaggccaggcagcagacatgctgagcctgcttgaaggcaggaccccagtccaatgcctagcctgcaggtccctgaagcgggcattcaccaccccctgaggcaaaatcagcttcctcacctggactcttgctttgtaaggctgtggttacaccaaacagcatgataggacgcacaaaacaaaatcacaaatcttcaagtgataggaacctagatgatgactgggccttctcctgctgtacagggaaagcctcaggcccaaagaataggttctagaatttggggagccattcaatgagataacaggtaagaaggagccctgtccaaagactagatttttttttttttttttgagacagggtcttgccctcttacccaggctggagtgcagtggtgtgattaaggttcactgcagcctcgacctcctgggctcaaatgatcctccaaactcagcctcccgagtagctgggaccacaggcacatgccaccacgcctagataatttttgtatttttgtggagacagggtttcgccatgctgcccaggctggtcttgtactcgtgagctcaagcaatctacctgccttggcctcccaaagtgttggggttacaggcatgagccattgctcccagctgaatttcttaaatataaatgagaacctcagcagcctagtgacaccattcaagtctcattccaggggcaaccaggggaagcaaagtgggctgagccagttatgtaactcccaagcttaaacccctccaccttccaatcaccctgaaaacaaaaatccaaagtctaccacagtgtatccctcaggatgcatctggtcacaggcaacagaaaacaggcccttattgatgatttcacctggaaggtgttcagagcagggcagctccttgcctggtaacatctgcggatcaacatcttccttcccatttctctactgtctccttcatcttcagccaagctctcacccctagagctactcaagctcatgcccattcaggttttttatactttccaaccaccctgcatccattactcactccccaggtctttgcatggttcgatccatcatcatgtcacccacgtctgggataaaatgtcactcagcacagaggtgtgggtccaaaggaatctcaccccctcttctccatcatctttgtttctctttcttcacacatgtatcattatcaagaattgtcaggctgagtgctgtggctcacatctgtaatcccagcactttgggagtccaaggcaggtggattccttgagtccaggaatttgagaccagcctgggcaacatggcgaaaccctgtctccactaaaaatagaaaaattagctgggcgtggtaccacgcgcctttagtcccagctacttgggaggtgagaggattgcttgaacccaggaggcaaaagttgcagtgagccaagatcataccactgcactccagcctgggagacagagcgagactctgtctcaaaaaaaaaaaaaaaaatagaattgtcctgttatcagtgtcccccactaaggggtgaactgcatgagggaggacacagtatggcatgtcccctgcctgatccctaccacccaccacagtacctggcagggagaaagtgcaggggctctttgctgaaagaatgcatgtgttgcacacatgctggaaccctgacaacttcccacttcatttccagaaaggaaaagtcggtactggaaggtcattttatgtccagtaggacaatccaagcccaaatcctagaccagctccagacttctgggtgtcttggggcatgtgacccctgctctggaactctgtcctcacctacaaaatgagggtgcagaatggactagactagtggttctccaatctgggccgcctgcagagaggccttctaaaacaaattcctgcacctccacccttacttattaaagcaggatccagaagttggggaagagaggaaccaagaattaaaacctgtaacatacgcaccaaggtgataatgatgtctattgggaccttcaggttcttctgaactcagaggtactggaataaagggcaggcccaggcccatggctgccacatggactctccagagaaccttccagatgctctgcccaagcccagctcgtgcagctcccggaaccagcttcctttccctccgagcctgatccatgctcattcactcatccctgggatgagctaggagtgtcagtctctcccagctgaccatcagcagccttagggctggaaccctgtctgtgatatgcaatgttctactgctgtccagaaacactgcctggcacaatatgtgtctgtgggaatgaaggaatgaacaagagcacgcaggcccattactgtggggctttttggagcctgcaatgaattaagatgctcagagaggccgggcacggtggctcacccctgtaatcccagcactttgggaggcagaggcgggcggatttcttgaggccaggagctcaagacctgcctggctgacatggcaaaaccccatctcttctaaaaatacaaaaattagccaggcatggtcgtgcacacctgtagtcccaactgctcaggaggctgaggcaggagaatcactggaacccaggagatggaagctgcagtgagctgagatagcaccactgcactccagcctgggtgacagaatgagacactgtctcaaaaaaaaaaaaaaaaaaaaagtcactcagaggatctccagacaaggagaggcccacctccaccctgtgcagtcaggcccagagcctggaccatgaaacagaggttgggacacatttgccatagggaacagggactgccccatacagtcagtactctatgaatgcacaagaatgtcatgtatcttgggggctgattgaatccaatagacaggggccatctactctacttacttcaggcacgtttgaactgaattaactacctagacgcattcataaggttttttcctttccgtcaactctttttttttttttttgagacagagtcttgctctgtcacccaggctggagtgcagtggtgcaatctcggctcactgcaagctccgcctcctgggttcaagtgattctcctgcctccacctcctgagtagctgggattataggcatgtgtcaccatgcctggctaattttttgtatttttggtagagatggggtttcaccatgttagccaggatggtctcaatctcctgacctcatgatctgcccaccttggcctcccaaagtgctaggattacaggcatgagccaccgcatctgaccctttctgtcaacttctatactaaattatttatctgcttcttctaatcttcccagcaaccttctcccaggagaggtgaatgccccaaactcacctcagggccgcccactcactacagagcctgtgaacacttttctgtctacctgggatgtttctctgcaggatgatcatagatcacctcagtgacacccgctcatccttcagacagcagctctcacatcacctcctaagggaagccctcccagatttctcctgttccctcacagaactgggctcctttccctcagaacataccctttcttcactagtccctcaataagtagtggcgtacactgaattacttcattcacatctgtcccacgcataaaactggaagagccccaccaccagagacagggttgggtctttcccacctgccagagcctggcacatttgtaaccagagaagtgcatgatggtaatggaagccaaggaccacacaaccggcaagcggcctacccaggatctgagcccagaactttctgactccaggccaggcgtggtggctcacgcctgtaatcccagcactttgggaggtggatcacctgaggtcaggagattgagaccagcctggccaacatggcgaaaccccatctctactaaaaatacaaaaattagccgggcgtggtggcgcaaacctataatcccagctacttgggaagctgagacacaagaatcacttgaaccccagaggcagaggttgcagtgaaccaagatttcgccgctgaactccagcctgagaagcaagagtgaaactccatctcaaaaaaacaaaaaaaactttctgactccagtgcccagagtcagtggctcagcagctcatggactcagtgctgagtgccgtccatgcccagagcacagcacgggcaccagagagggctcccctagggctgctacctgccagcctctcaggtccctctgctctgtcactctctagtgccccaatggctcctaacggcttaaaatggagaattaaaatcaggagatgtcaatgggctggttcatgttcttgactttgccccacaaaagaatctgagagctagtccaaagtaaaagtaaacaaaagggtttattacaaagcaggctgggcccggtggcttacgcctgtaatctcagcactttgggaggccaaggtgggtaggtcacctgaggtcaggagttcgagaccagcctggccaacatggcaaaaccctgtttctactaaaaatacaaagattagccggtgtggtggtgcacacctgtaattccagctgctaaggaggctgaggcagaagaatcgcttgaacctgggaggcggaggttgcagtgagccaagatcacaccattgcactccagcctggtgacagaataaatttccgtctcaaaaaaaaaaaaagagtttattacaaagcaaaacaaccctctgacagctcatcaaaagtgagacagctccgtgtgatgggagggatcttcctttatgggagatttgcatgattattcatcaaggggcaagaaagaggggctgctacgaaacacgttgggggtgctttatgaggcctgcatattcagtggctgtacgcgctattacatacatcgcatgtctcattaaaatcttaaatctctacccatgggtatagctaaactaaagtttttttttagcatcaaaaagagcctaggtcagtttgaggtcattagttccaggtttccgcacctgtgcaggcctggggattttttttccctcagttcttcctcctctttgctacaggatgtctttaaccacaagcccccgatgcggttcatggaataccaagtggcttgttcttgccataaatttgataagtgtttttttaaagagaggctctactatctaacctacctcagagagacagacacctggcctgcccgcccccttcacaagaagctccaagcactccgaacatctttcaggaagacactggcaatgttgcagcaatgagaaggggatgatttggaaggcagcctgaatcacgctgcccttatcagcatgcttggattgtgtcccttcttgtctgacttttcagacagacattgggctataaaattgggatgcagctctgtcatcaacagtctggcggcaggagcagaaggaaaggcagcttccgaaaacttggacccatccaccccaggcaaggtaagaacttgctgcgtcgaacgggtgaaagagaaggtccagctctcaggtagcaacaagcaacgcacagtccatctaaggacccataacgagggtttatgcattttttgatcgctttagcaatgtccctcccctgctgaaatgcactctgcctagcacagggaaggtggttgacaattgcctgttatgcattggttttcagagaatggatttagtcctgggattctcaaaaggtttcactcaagtcaaagtctgacaatattgccatcaactcagtcacaggcatagattttttttttctgcgaaagtatgcttagatgtcatgtgagatactgaggttgaatttcccgcagatgagagtaaaattttaaaaactaatgaagctgtgttgagatttttttcataaggcctaattaattcaaactgaagaattctcactggcttcattcagattgtacccttcctcacattcctgccatagttgctcttcttttttagggatagagtctcgatctgttgcccaggctggagtgcagtggtgtgaacttgtctcactgcagcctcaacttcctgggctcaaccgatcctcccacctcagcctcccaagtagctgagattacaggtgtgaaccaccacgcccagctaatttttttttttttttttttttgtagagacggggtctcacccttttacccaggccgggatagacacttttttagggtgttggcaaatggcaaatggcttgcttttgttaatgcctatacatggcaagggcaaagattcacaacccagcctggcgcagtggttcacacctgtaatcccagcactttgggaggccgaggcaagtggatcacctgaggtcaagagtcagagaccagcctgaccaacatagtgaaacctcttctctactaaaaatacaaaaattagctgggtgtggtggtgtgcacctgtaatcccagctactcaggaggctgaggcacgagagtcacttgagcctgggaagtagaggctgcagtaagccaagattgccccactgcactccagcctgggtgacagagcaagaccttgtgggggggggggggggggggaaaggcccccaacccaattttacaaaacaagctcaccttgcctcaccaaggtaaaatgccaggggacacaaacctccacctcaccctaaacattagagggaaaaacttgggaatcacacttttggaggaaagtgagggtcagtggtggggatcaatctctgaaagtcacccagcacagctcacactcaaacaggggtgtcctgactgggtgtggaaccagctctctgcctcctgagtctcagaatcctcagtgtgagcagacatatgcacacaccccagtgacaagagatagacctgagagtgcagctgcaggattcagaactctccagttccccagttagtgactcagatggctccagggatgtgacagaggaaggtggcatgagaatatgtgacctgaaggtaacaccagtgagcagggcttggcctgtacttaaacgcaatgaccagcctggagagtaggtctatgcacagttgaaaagaagtagggaggtcaaggcgggtggctcacgaggccaggagttcgagaccagcctggccaacatggcaaaaccctgtctctactaaaaatacaaaaattagctaggcgtggtggcaggcacctgtaatcccagctactcaggaggctgaggcagaagaatcgcttgaacccgggaggcggaggttgcagtgagccaagatcatgccattgcactccagcctgggtgacaggagcaagactccgtctcgaaaaagaaaagaaaagaaaataagtaggaaaaagccctttcttcaagacactgactgctacatactgcaacattttcccatgactgcagcatacagactagaatatctacgatgggaatggcaccctcccgcaagggccaggaccctggtatgtggacgtcctacacaaacgtacattgtggcctgatggtccctggggaatgtggtgtctgaagaagccctcttttgcaggtatcagccaccacgatgctgactctctgggccctggctgtcatgttggcggtcgaggaagcacttggccagctggagctcgcagataggccttccctaatacccactttgcctgtccgttttccacctggattgctccctggaagtctgtcagtctcaaaagtccctctaaccggaaaatacccagcgaggaccaaaggaggcaggtgtccacccgtcaccaagtacttcatatctgacagcaaactcgaagactgtaagtaagggctacacacccttggtcctttcagcccctcacgcaggcttctcattcctaagctcagcggggggttctgtcttctgaacatgtgggtcccgaacatgagggggtgttggactcaccttagaagcttgtgatagaacagttgcccaggcccccctagccattctggtccggcactactgcagtgggcctgagagtctggcttcctcatctgctccaagatggcactgaggctgcttgtccagggtccacacgtaggttaggggtggtctacacaaccctggaggagggaactctcccacccggcagactgattacctcccacctcacctggagactgtgcggagagactgcccatcccctccctgctgggccccagggctcacccagactcccacaggtgctgaaacctcaatccgctttaacaggagccaggaaatgggaaatctgggccccgccatcatccccttgaccagacttgttctctccaaactccttttgttcactcactccctgagtctcacctcctgcattagacaatgaggaattctttcctccaagaaccccgcagagggtgagggcagagcaactcaggaatttaaggctgggcaaagaagtgactcccactgaggagccagaaggagcagggatttattagcaaatgaaggccagcaggaaggctctcagtgctctgacgccagcctcgcagtcatggcccacctcagccatccaggatgagaggacagggccacacagggagacctggcacatgctgcatgaccaaagggccagccccacaactacaatgcggactgctttgactcgggaagaacatgtgctttgctcttccagcagccttccttggtacaaaatacttcaaatatatagaaaaaagaccagacatggtttaaaaaaaaaaaaaaaagacagctttgtacccatcacacagtgatttggaggtaatggtggttaattttggttgctttgttttgtttttgtttgtgtttgtgttgagacagggtcttgctctgttgcctaggctgcagtccagtggcacgaggccccttcactccatgcccaaatccctttagatgtactcaacagcaggctgatctcatagtagttactaataaatggtagctcttaataagggcacaggcaaatttctctgacaccaggctgtccttggagtaggcagtagcaagcactgttttttccaggaggcaccatatacagttcctatggacccctcaattcaaatgtgccagctgcctggcaggaaagcttcttcttgctgaaccaactgggaaggccacagcaagaatgtgtctcttgacccttttcagatatgaatgccaccttgcccctgcagattgagaagattctgaagtgtgagaaggttaacttggctggtttgcttgggaccgtattatccacagtgagcgacttggacctgctgtctctattagacctcacttcaccccttgatatacttggaggtgccagcctcagtggtatcctaggtgagggaagtggcggcaagtcctcgaaacttccattgctctcagaactcactggtgctgtcagtggtctgctaccccaggggacggagggtctggtgagcctactacccactggttcagacaagaaccctgtaaaaggactcctcggtggcactggtctctccactctccagcggcctctgaaggatgtgaccgacaaagtccaagacctcaaagagtctgctcagggcgtgctgaacagcaccctgccctcaggcatcagcgatgcactcccagacctgctgaaaaatgctgacctggaacagctcttgctggggtaagtgcttccttgaccctatgtatgacttctccaccagaaacctgctgatttggatgctcatgttcaacttccaacagtcccacggattgggatgggtatattgcttgagattgatatatttcaccagaaatattctcgctctatgctgtgcctatatcctttcagggggaaacaggatcaagatttttgagcttataggcctgggcacattagacagctgaggggtcaagggactggatggtggcttggtaggctgttaattatctgcttcaaaggcatttctcctgctgtccaggctgattcgttgaaacaggactgactcttgatgctttcgctttgcagattacaggttgaaaaagtaactgtggagagcatgaagtcaaccacgacaggcgatgggatccatgtccaagccacgactacggccttcataggtggaaaagggtgagtctgtgcacacagcagtccactgggtccccctgccccagggttgtaacatccagtgagcaaagaccaggtagagacaacagagaggacagcagcatgggtgaggatggggcaaagcgggcactgcacacagctgcccctctccccaagtacaggtgggcaaggcaagagaatggtccagggagcctcatcctccaataatgtgaacaaaaatgttgacgggctgggtgtggtggctcacgcctgtaatcccagcacttggggaggcctaggcgggcggattacgaggtcaggagatcgagcccatcctggataacacagtgaaaccccgtctctactaaaaatacaaaaaaatagctgggcgtggtggcgggcgcctgtagtcccagctactcgggaggctgaggcaggagaatggcgtgaacctgggaggcggaggttgcagtgagccgagatcacgccactgcactccagtctcggtgacagagcgagactccatctcaaaaaaaaaaaaaaaaagaaaatgacaggacccactcaccccacccaccccactaagccactagggaaggcaaaactaggtcatgaaaagtgctgaaagaggcaaggttttagactcagttagtttcacttacaggaatctgtccaaaaaacctaagtacagatacatttaaacacaaagacataggggtattcatgatgggaatttaaaaaacaaaaaacctgaaacaaaaagcaaataattaaaccaagtacaagattagaaatgctgacaacatttataatggtatacagaaatgcttgtgaagttgttttttttttgttttgtttttgagacaaggtctcactctgtcaccggggctggagtgcagaggcacaatcacagctcactgcagcctggatctcctaggttcaggtgatcctcccacctcagcctctcaagtagttgggaccacaggtgtgtgccaaggtgctcagctaacttctttttttttttttaattttttgtggagaccaggtcttgctatgttgctcaggctgctctcaaactcctgggctcaagcaatcctcctgcctgggcctcccaaagtgctgggattacaggtgtgagccaccacgcccagctattgttagttttattttattttattttgagatggagtctcattctgtcgcccaggctggagtgcagtggcgtgatcttggctcactgcaacctctgcctcctggattcaaatgatttttctgcctcagcctcccgagtagctgggactacaggtgcacaccaccacacctggctaatttctctgttgttgtagtaaagatggggtttctccatgttcatcaggctggtctcaaactcctgacctcaaatgatctgcatgcctcggcctcccaaagtgctgggattacacgtgtgcaccaccatgcccagctattgttggtttttaaactaacaatagcaaagtttactttgctgaaacttctaactttcctgctctgtggagtttgcatttcataagcagggggaaatgcatattaaccaatgaaggtcagaatatccatgaaaggaaattacagacaagatgggctttggaatgtgggaaggaatgagggcctgccaggctgacagcgcatgtacaggaaggtaaggaatgtgactgttggccaggcgaggtggctcacacctagaatcccagcactttgggaggccaaggtgagtgggtcgcttgaatccaggagttggaaaccagcctgagcaacatgacaaaatcctgtccctacaaaaaatccaaaaatcagccaggcatggtggcatgtgcctgtagtcctagctgctagggaggctgaggtggaaggatcacttggataggaggaggcagaggttgcagtgagccgagattgcaccgctgcactccagcctggcaacagagtgagactctgtctcaaaaaaaaaaaaaagtgacacagatacacacacacacacacacacacacaccttactggtagaaacacttaaacaagggccattcacctgaaaaataatgaatgtggcttctcctggaaagtcagagatctgggtgccctgagcctaactgcatggggtccacgggcagccggagctcagcagcagctcctccttcaccaggtgcctgccctcagggcactgcaaaccccaccatgcccacggtcccgcaccacagtggagttggggaggtcaacagccacgtgtcctcaggctcctcccacagcaataccttcaggaccacctcaccctccacctccccagtcagacctccaaaggcattgaaatgggtgtcggtctcatgtgattaccgagatgttttttctgctttttcactctaggctaaagcccactttaacaaaaataccgtcactgtgcctggaagttctctctcttcagacactaaaaatgtcagcgtttccctaattctgtcctacgcgatgctgaaggtcatcatcactcacactgccaagcagagctctgtgcaggtaagggtcgtccacagggcccggcgtggctcagcactttcctcaagctcagccggtcagcctctgacagcaagaaggtgggggtgaaagtggattctgaatgttctttcaggttaatacacgactgccatgggatgcaccttttcccttcattgtcatgtaaatgggtcctggtttatgttggtggaaagcagagaacagggacttggggagaaaaatgtggtctgaagccgggtgaggtggctcatgccagtaatccccacactttgggaggccgaggcaggcaaattgcttgagtccaggagttcaagaccagcgtggacaacatgttgtcaccttatctcagcaaaaaattagccaggcgtagtggtgcatgcctgtaagtcccagctacttgggaggctgaggcaggaggatcaccagagccagggaggttgaggctgcagtgagctgtgattgcatcactatattgcagcctgggtgacagagtgagactttgtctcagaaaaaaaaaagtgggggaggaggggttctaagtgccatctgtgtgctaggggcaaaaccaggtgtctttacataaccaacatcatttcatcctcaaaacagcactaggatgtagggtttcttatccccgttttacagatgacgagagtgagggaaggaagcaccaacagtcacagaatgagcaaaaaacataaggcagttgttcatttgctaccggccctagaagtggcagagggaatagtagcaatagtaacaatcataattgacttttctctatgtgccaggctctctttgaaacaaaatataattttttttaagagtgtgtcccaaagtgatcaaatgatcaagtgcagaactctcttcccacaaaggcatacagagagacaggcttcagattggacaaggtgtaatagaaaagtaagattttacatgttgcatgcccccaccatccttcaaagaaaggaaacattatcaaggtgaatgtttagaaataggccttgtctgtcatggtcacaccagctgcaccagcacccaggtgaccaacttacaccagacgataaatatttgtatgtatgatctgaatgatgcgagagtgtttcatactgcaacatcctgcagcccttactcaacacactctaaatgactacttctttccaacagagaaataacctggatgcaagaatcaccaaactaacctactcccaccggccagacataaaatctaagccagctactgggttaacatcaccaaggacggtgggagctttgtcaccgggcaaacggtgagtgctgagaaatgaatcagagcagagttgagaggaagaattgcaaggagcagtgtttagtgggtttagttactccctaaactctgaggctcagagtgtctgggtgtccctaggatgagggagtccagccaggctggtgggctcagcccccaaagggagaatggagtgagcaggttggcttaggaggataaggccaggcagacaaccctctgacctgggaccctgttggccatcgcgcactgtgacatgtttgctgagtagccaggccaaggtgttattgttaactcatgttcattttgtattaattcaggaattaatcatctcattcgtgagcaagatttcgaaagacaaactgatcacagacatcaaacttctgaggtactgtctgtaactacataatctgcctgtctatataagagatatctaaggtctgataaaaatcgcataaccggctgggtgcagtggctcacgcctgtaatcccagcactttgggaggccgaggtgggtggatcacaaggtcaggagttcgagaccatcctggccaacttggtgaaaccctgtctctactaaaaatacaaaaattagctgggtatgatggcaggtgcctataatcccaggaggctgaggcaggagaattacttgaacccgggaggcagagtttgcagtgagctgagatcatgccactgcactccagctctgggcaacagagcaagactctgtctctaaggaaaaaaaaaaaaaactacataagcaaaataatcacaaggttcttgggaagtatctgcaaaattacagagaaatcaggatggagttttgaactcacatgctgttgttcatcttacattgactctttctgctcagtagtttccaatttataagtgactttaaggagcaactgacatcctacttagctctacaatggagttgtattttcacctgaatctaatatttctctgtactttgtttcctgacagctctgaacacaatacaacaccccccaagtttcttatgttttcaatatatttattgatggtatgtgagaaaagattgtagtgccaggtgctcagtgccatacacactctggaaagaaaaggtcaggaatggccaggcatggtggctcacacctgtaattccaagactttgggaggacggggtggttggatcacctgaggtcaggaattcaaaactggcctggccaacatagtgaaaccccatctctataaaaatacaaaattagccaggcgtggtggcgcatgcctataatcccagctactcaggaggctgacgcaggagaatcgcttgaacccaggaggcggaggttgcggtgagccgagatcgatcgcaccattgcactccagcctgggcaacaaaagcaaaactccatctcaaaaaaaaaaagaaaagaaaaaatgtacacatcgattgtatgtaaattacacatacctcaataaagctgttaatagtgtgtatggtatacaatcatttgtataaaataatcacaaatataaatcattttatacacagagattatctctgaaaagatacattagaaaatgattaatgtgctggattttgtaaaagggaactaggggattagtaggcgggaaggtgattgattacagatacctactgtattgtttggattatttaccatatgtatgttttaccttttgtttgtttgttgtttttgagacagggtctcactctgtcacccagactggagtgcagtggtgcactctcagctcactgcagcctccacctcctgggttcaagccattctcctgcctcagcctcccgaatagctgggattacagagatgtgccaccacgcctggctaatttgtgcatttttagcagagacggggtttcgccatgttggtgaggctggtctcaaactccagacctcaagtcatccacccgccttgacctcccaaagtgctgggattacaggcgtgagccaccacacccggcctgttttacctttttataaaaattgaaataatttcaaaacctgctttaagtgccttctgaagaaaggactagggtaaggaaccatcacagataaatgttctcaatagaagacggaccctaagagtagaaaccaatccttgagcgctgaaccagcacctgaggaagaggttcctgttgtgcaggtaaatgaagaaggtctaaaggacatcatggccagacacacaataaaagccccagtatatcctaatatacacaatctgtttgagaagtaaaatcttttgatgatctctcccatttgataagaccttataatgttccatggactgtgctaaactctctagaagcatgattgtgtcactgaattccacgtgagatatgcatgtgattatcttcatgtttcacatcaaaaaaccaagccaggctgggcacaatggctcatgcctgtaatcccagcattttgggaggccgaggcaggcggatcacttgaagtcaggaaggagtttgagaccagcctggccaacacagtgaaactctttctctactaaaaataaaataaaaaattagctgggcgtggtggcaggcgcctgtaatcccagctacttgggaggctgaggcaggagagaatcgcttgaacccaggaggcagaggttgcagtgagccaagatcgtgccactgcactccagcctgggtgacagagcgaggctccacctcaaaaaaaaaaaaaaaaaaaaaaaaaaaacacacaagacagagaagaggagaagagtaaattaactactcaatttcagacaactctcaagcaataaagtggggatgtgaaccaaagtcctctgactccaaaaattccatgctaccatctcttggatatttttttcatgatacccacagaatgaaataaccttggtggtgaagggggctgagaaccactactcgaaacctactaataggtccaagggaaaagagacataatttttttaaagcctaaaaagtaatgacatctttttttttttttttttttgagactgagtttcgctcgtcgcccaggttggagtgcaatggcgcgatctcgactcactgcaacctccaccttttgggttcaagctattctcctgcctcagcctcccaaattgctgggattacaggcacccaccacgatgcccagctaattttttttgttatttttagtacagacagtgttttgccatgttggcaagactggtcttgaactcctgacctcaggtgatccacctgcctcggcctcccaaagtgctgggattacaggcgtgagccactgtgccccacctggtaatgacattttctaaaactccaagtgctgtcagacctcacaggctgaaaaagaggtccactggtggcaaaggccagggaggctttggagggcaaggaggcttccaaggaggcagaggaggaagaagagaccacagctacaggaaagaagatgaagtttgaaaagcttcttctatccttgtcttttcctcttccatttgaaaggactcgggtttttactctgtgcctgatccatcacagagccttctgaggacattccaagattgtctacagtcctgtggtccacttggaaattcagacagataatatttcaaggggatagttggttttgactgaatactcatgaaaacttttaaagaaatgagtgatagagctaacccatatctgtaagttttgatggtttttcttgttttttatttttttgagaaagggtcttgctctgtcacccaggctagggtgtggcggtgtaatcgcggctcactgcagcctctatctcctgggctcaagtgatcctcctgcctcagcctctcaagtagctgggactacaaggcctgcaccaccacacccagctaatttttttttttttcctgtaaagtcaggaaacctgccacattgctcaggttggtctccaactcctgggctcaagcaatccacgtgcctcagcctcccaaagtggtgggattactggtatgagccaccatccccagcttatgttttgaattaatagttgttttttttttttttttttttttttttgagacggagtcttgctctgtcccccaggctggagggcagtggcatgacctcagctcactgcagcctccacctcccaggttcagtgattctcctgcctcaccctcctgagtagctaggactacaggtgcctgccaccatgcccggctaacttttggatttttctttagcagagtcagggtttcaccatgttgaccaggctggtcttgatctcctgagctcaagtgatccacccgcctcaggctcccaaagtgctgggattataggtgtgagccaccgcgcccagacaatattgtttcatctcatgtaagaaaacatttttttccaacaaataatttttttatgttgggggttgtaaaggaaagcagagtgttttatcaacttttttgcttgagtggctttagaacaatttaaaagtcaactttggtgccagataaaaagaggtccatgagggaaatcctcaggtaaaacatgcaaaataaagtgcagcgataggcagctaagtcagtggcatccaatgcaaatgtcagaaaggtcgagagcagttttcccaagcaaatggttctccccaccttcctctccttcagtctctgcctcctagggcccaggggagaaaacctgagagggagcagtgtccacaggagaaactgggtggggaaacacttaacacagactgcagggaaaactccagaaacactaaccaaggtaaaaacgaagtcaaagtgagagacaaagggttaaccttagtttaggtaaatttaatgactgtaaaagctgttcacatagcagctttaaagagacacgttttccactgacataaagttgcttcgccccttgcagcttatctccaccttcatgacctgtttcctcagtggcaggcaatgtctccccttcctgttggggaggattgcccaagtcagctctgaggccatcctctcaggtcagcaatatgcagaagagtccctcagagtggtcctgcagagaacatgtcccctaagtgtctgagaactggctgaggtgatctgaaagaaaaccaggcagaagaaggcaaaataactaggactgtagcactgggacttcatgtggagcctctagaggagaagcccccaaaaggaatctgatggaggcgaccggctggcagagaccacatggctcctgtgtgcccccgatcctggcaggaagcgaggtctcatggaatggcaatggatataatttaagaagtcaaagcaggtcagtcccagccacttctcccttttctcttggaagatggctcctcctcagctctaaccataaaattcaggtgaaactgcccatcacaggccctgccctcctaactccaaggctgatccagtcaaatccttccttaggatatttacagccaacatttggtgagaaatgttctctctcctccaattgagagctaaaagaatgtgaccccaaagttatctgtggtcacatgtcttatcataagagcaagtcagtccattagtaaatccttactaagtacatattttgtacccggaattgccctaggtgctagaagataaacaaagataaacaaacagaaacaaaacaggcattttccctgcccttaaaggaacttctgtggatgctctagggcatcagtctgtgtcctgccagcttctggttctgaggcgaagcagatatgagaacaagacagggaaggtggcagtagcagaactgggcagtgtgagaagagaaggcagaagaaaggaagaaatggaaggagacaataagagaagcatatcgccagtgaaagggagaaagaaagagagaaagaaagggagagaaaatcccacagccatatagctgatctgtgagtccagggaagagacccaagaaactcgagcacatgtaagttaaagaggcctgagccgtcagagatcacaaagaaaatgttgatctccaacagggaacactctctactcactcgaaatcactccacctcctggcctctctgcagcgagaaactacatgccactgcatactccaaactcaccaaattcccacaaagaacgcttccagggcaggagaataggtaagaagaataagaaggcattagtaaggagcagtctaaaatccaatccaaagtgcccttccattgtactggttgagaggggatttttattttactaaaatgtgtctctaggaaaaaactttattaccacaaatatccaaaccaacactcatttcacagtgcaagccaaaagcccaaaaggactcctcaccttcaccagcacatagtccccaggctgggctctgaccctgagcccagggttattgacatcctccatctctgcatcagggaagatcaccttaaggtttccatcattcctgccacacaggtcagtggcagagcgtttactgagctgcagaaagaagagagaagagttcgtggatttgtcacagttgtaagttcttggagggtagaaactgtgccttctctgtctcggatccccaagagtctgacccacagagcattccttaaccaaggaatcactgaagactcagtgtttgctgctgcttcaccagcaagggcagtgtatggcccacaacagaaacactgtaaagttttgctaactatattataatgaatcaattaatcaataagtctgtgcagaactgccttctgcaggaatggacctccaacaggcctaaagccagagacttatgagcgatgcatttggaaaaccaactttcacttcacccagtctcatactagtcacttatgaatgaatgttctgggattgtttggcctgcattacttgccctcactgaatagacagactgaaaggcagaatctccaacacaacacacagaagacagagccaggaagatactaacatcactatgatgggattaacttctagagtctacggaaacccttctcttccagccatggtaaagagacagaaacaagtttacccttcagccttataaataataaccagcaaattgggtaaaatatatgaaacaactgttttcggatactggacaagagatcatacaagactgtgagctgtgagagaaggaaaacaaagtgagccccccaatcacccctgctttctgccagaaggtacatgccagacgggagcctgtgaagcaggaggggagagctcaagcacagcacagtggtcctcccctgcactgaagagagagggatcaatgttcagggagactgaaatagttagaaactgtgaagcaaattctagagagaagggagcaaagcggaaaaagaatttcagaaatatgcagggggtccttatgagtcttcactgaacactaacacttgcatgtgtagcataaaactccatgaagtcaggcaaagagagtaacctgggaactgtccactgaacagttcccagaactcacatgtggcctggaatccactaccaaatagaagagtttatggatttgtcacagtcataagttcttggagggtggaaattgtgctcatcggttccttgggatatattcactagcaattcctgacagaaggccacatcttagtagtgaaactaaactatccagagaataaaaaagtttttctggccaggcgcagtggctcacgcctgttaattccagcactttgggaggctgaggcgagtgaattacctgaggtcaggagtttgagaccaacctggacaacatggcgaaaccccgtctctactgaaaacacaaaaattagccgggtgtggtggcgcacatctgtagtcccagtgactcgggagactgaggcaggagaatcgcttaaacctgggaggcagaggttgcagtgagccgagatcacgccactgcactccagtgtgggcaacagagtgagcctcagtctcaaaaaaaaaaaaaaaaaaaaggaaggaagggagagagggagggaacaatctctgtgacctctgggacaatatcaagtggtgggacatatgtgtaattcaagtacggaagtggtggaggtgggtggaagaggaagcggagcaaaaaaatctgaagagtaacaggtgaaatttttccagatttgatgaaaactataaccccagaaactaaaaagcctcaaaaaaatcccaaagaaaacacaaaggggtaaacacaaagaaaaccacccccagccacatcaaattcctaaaaacagtgataaagcaaaatcttaaaagcagccaaagaaaatggcatagagtaaagaagaatgaccacaaacctgtcagaatcacgtatgtcagaagtcaacagaatgatatctccaaaatgtcaacctaaaagtcaacactcggtgaaaatatatttttaaaaggaaggtgaaataaagatcttttcagacaaacagaagctgagcagcatcactgccaaaagacctgcattacaagcaatgttaaaggaagcctttcaagcacaaacaaaacgatgcccagtggaaacgtgaacgtacacaagggatgaagaatgccagaaatagtaaatcagtgggtaaatacagactttctctcattttttaaagttcctttaaaagataattgtttaaagcaaaaataacaatgatttagggatacaaaagtaaaactctgtaaaaatagtacaaaaggaggaggaagggacagaagtatatcattacaagaatcttacattatatacactgagtgagtggtacccagtttggggttaaaataatgggccaaagagaatccaaagggcacataatctgccattagaaaatcaagctctgacaacatgctatattcttaagtaatcaaagacacagaaaggagttcagtctttaaatgaataccactttagggaaacaaccttcagctgagatttagaggctctactattccctacaaaatacttactagttacaaaaggaaaaagagtaactttacagtcaagaaggctggcagacagtatcttccatgttttcaaagttagcatcatcagtaatgagacaaatcaaaattgtatgccacctcacaggatatgattagaatacaacatcatctctctggtattcctgccaaagaatgcataacctgaatcttatcatgaaaatacatcaaattatggacattctacaaaataactggcctgtaatctttaagtgtcaaggtcatggaagtcaaagaaataatgacgaaccatcctagactaaaggagactagagagacatgacagttaaatgcaacatatgatactaaaccaaatccttttcctataaaggacagttcgaagacaactggaggaaacttacatggggtctcaggattagatggtagtaatctaacaaggttaatttcctgattttcatagttgtactacagttatctaggagaatgtccctgtttgtacaagatacacattacagtatttgggggtttggggacatcagggcagcaacttactctgaaatgattcaaggggaaaaaaagttctttataatacacttggaacttctctatgggtttgcagttgttttacagtaattttttttttaaaaaaagagagttcaggccactgcagtggctcatgcctgtaatcccagaactttgggaggctgaggtaggaggattgcatgaggcaaggagtctgagaccaacctgggcaacagagcaaaaccccatctctacaaaaaatttgaaacattagccaggcgtggttgtacacattatagtaccagctactccggaggctgaagcaggagggtcgcgtgagcccaaggagttcaaggttacagtgagctatcattacaccaccacactccagccagggagacagaacgagagactttgtctcaaaaaatataaaaaataaataataaaatcaattaaattgagatttcaggttccatgatttgaaaaaaaccaagtgtaaaagaacattcatgagacaaacagggaaattagaacactgagcaaatatttggtaatattaagaaaattagaagtgctttggaaatctaaaaagaatattaagacatttttgtcaattattgtcaggtatgataatagcattttgtttataatttttttaaagtccttatcttctagacatatatactgaaatatttactgaagaaatagcttttttttttttttttttgagatggagtctcgctgtgtgacccaggctggagtgcagtggcgcaatcttggctcactgcaacctctgcctcccaggttcaagcaattctctgcctcagcctcccaaagtcactgggattacaggtgcctgccaccacacttggctaatttttgtatttttagtagagacggggtttcaccatcttggccaggctggtcctgaactcctgacctcatgatccacctgcctcagcctcccaaagtgatgggattacagacgtgagccaccgcgcctggcccgaagaagtatcttatacttgctttaaaatcacccaccaggagcagtggaaatgaaacaagattagtcaagtattgacaactattttttggctttttttttgtttgagacggagtttcacttttgttgcccaggctagagtacaatggcgcgatctcggctcaccataacctccgcctcccaggttcaagccattctcttgcctcagcctcccgagtaactgggattacaggcatgtgccaccaagcccagctaattttgtatttttagtagagacggggtttctccatgttggtcaggctggtctccaactcccgacctcaggtgatccacccgcctcggccttccaaagtggtgggattccaggcatgagccaccgtgaccagcctctttttttttttttttgatacagactctagctgtgtattttttttgatacagactccaggctggagtaaggtggcacaatctcatcttactgcaccctcgacctcctggattcaagcaatcttctcacatcagcttcccaagtagctgtgactacaggtgtgcaccaccacacctgactaatttttattttttatttaatttgtagagattaggtttcaccatgttgcctaagctggttttgaactcctgggctcacgcaatcctccagccttggccttccaaagtgctaggatcacaggcttgagccaccatgcccagcagtattgacatttgttgaggctggttaataggtatgccagcattcattatactattctctatatgttttttgttgttgtttatttgggtttttttgaaacagagtctcactctgttgcccaggctggagtgcaatggcccgatctcagctcactgcaacctccgcctcccaggttcaagcaattctcccacctcagcctcctgagtagctgggactacaggtgtgcaccaccatacccaactaatttttgtatttttagtagagacggtgattcaccatgttggccagactggtctcgaactcctgacctcaagtgatctacccgcctcggccccccaaagtgctgggattacaggcacaagccactgcgcccagcctctatgtttaaaattctctataatgtaaaaaaaaaaaaaaaaaaaaaaaaaaagggcagggtgattacagactctggagagagagctgtatctaattctgactctgccacacactagctgtgtaaccttagggaagttatgctctgtctctgagctcagtaccctcatgcacaaaagggagctagtaacagcacctttctccaaggacagtggtggcactctgtgctgatggccataaagtgcgcagttcctggcagacggtaaatgctgagggatgtgagccattatcatcttttctgccactctggacatagcaacttggtgttttaaactggccatgtctggaggaaagaaagtctcctctaagagaaagcaatgactccaactgctagccttgaaaaacccatttattctctagccccaagtaagtaatggctatgttggatgaataagaaagagctttgtggtcgagagctgtggctcacacctgtaatcccagctctttgggaggccaaggtgggtggaacacctgaggtcaggagtttgagaccagcctggacaacatggtgaaatcctgtctctactaaaaatacaaaaattagctgggtgtggtagtgggtgcctgcaatcccagctactctggaggctgaggcaggagaattgcttgagcctgggagacagaggttgcagtaagccaagatcatgccactgcactccagcctaagtgaaagagtgagactccatctcaaaaaaaaaaaaaaaaaaaaaggccgggcacggtggctcatgcccgtaatcctagcactttgggaggctgaggtgggtggataactttgagaccagcctggccaacatgatgaaaccccgtctctactaaaaaaaatacaaaaattagccaggcatggtgacacacacctgtaatcccagctactcgggaggcagaggcaagagaatcgcttgaacctgggaagcagaggttgcagtgggccgagactgtgccactgcactccagcctggtcaaaagagcgagactccgtctcaaaaaaagaaaagaaatacttaggtgtaaatctaacaaaacatggacaaaatctgtatactgaaaactacaaaaactttgatttaaaacatcagcctgtagtcccacctacttgggaggctgaggcaggagaatcacttgagcccagcagtttgagtccagcctaggcaacataatgaggaaaaaaatcaaagatctaatgttctgaaacataaaaaacaacataacacacacacatatggcctcaccccttccactagcaccaactgggtacagcccacagaggtctgattggcttttgttgcttcttctcggaagatagtgatgagttcctccaaacgccttaattttacctcttccgggacatcatccttcagcctatgatatgcccgtgtcttctattaaaaaaaaaaaaaagagagaagatggaggtcaccaaggacttgtagaatctattcttaatgcacagagggcgaccatgttcattctacctacaagtaacagacacatgtacagaaacccaagccagaggcaagaggtttctctggctctgggagcattccaagataaaaaggtagtggagtcatatttttgcaagggttaaattctaaatttagcacatgaaaatcatagactcaaaattactcttgatatttatcctaacgttacacttgtacatataccaaatgactcacatatactaggttactcagcagtactatttatgaagacataagatgcaatgcagcctaaatatttcaataggcaagtagtcacagaaattatggtttatctatacaatggaatattgtgcggctgttaaacagaatgatagttctatatgtactaatgtggattgttctccaaaatctactgttacttgaaataagcaaagtgcagatcaacacatgtaactttagtgtagacagaatacatacaggcatgcttataaacacacgaaatatgcccagaaagttacaaaagaaattgctaagtggttgccttcagggaaggaactaaaaaaactaggcaacctgggaagaaggaagaaccactcatgtacagcacttaaccttttgaattttattcaagcatgtattacctagtccaaaagaaaaaagggaatttatccttaaaacacctttaaatcatccaaaaccacagtgtgtattatatctttatgacatgagctcatgctcagtacagctggagaaccactgagctagacaaaaatatggaataaaaggaatatctatataccaaagtttggacattcaaaccaatctaccttgaagagaagtatccacggaggaaaacggagaatcctaaaaatattgcagagtttactccattctgtcttactactaacaacaataacttacctctgttgtgcatttactatgcatgaaacacaattataactgctttaaacatattatcttacttaatccccagaacaaccctatgaggttggtaccaatgttggaaaccaagacatttgcccaatgtcacgtagttattaagcagcagaggcacaatttgagtgcttgctctcatccactaggttcttgattaagttcctataaccttaacccttaggaattaggtcccaaagtgaacattcatattcactgaccataagatgcttctgccacaagctgaaaacccatttcccatccctaggatttttttttcttttttgagacagggtctcattctgttgccaaaccggagtgcagtggcacaatcttggatcaccacagtttcaacctcccaggctcaagtgatcctccgacttcagcctcccaaatagctgggatcacaggcatgtgccaccactctcggctaatttttttttttttttttttttttttttttggtagagaagggtctccctatgttacccaggttggtctcaaactcctgggcttaagtggtcctcccacctctaccaatcctagtattaaaaagaatttctcaggccgggcacagtggctcatgcctgtaatcccagcactttgggaggccaaggtggtggatcacctgaggtcaggagtttgagacccacctgaccaacatggagaaaccccatctctactaaaaatacaaaattagccaggcgtggtggcacatgcctataatcccagctactcgggaggctgaggcaggagaaaaacttgaacccggaaggtggaggttgtggtgagctgagatcgtgccattgcacttcagcctgggcaacaagagcgagactccgtctcaaaaaataaaaaaaaagaatttctcttgggaggctgaggtgggtggatcacaaggtcgagagatcaagaccatcctggccaacatggtaaaaccctgtctctactaaaaaatacaaaaattagccaggtgtggtggcacgcaccagtaatcccagctactcgggaggctgaggcaggaggattgcttgaacctggaaggtggaggttgctgtgagccaagatcatgccactgccctccagcctggtgacagagcgagactctgtctcaaaaaaaaaaagaatttctctggcatatttgtgatgtccatggaaaagaagcaaaatagaaggggccaggcacagtggctcacacctgtaatcccagcactttgggaggccgaggcgggcagatcacgaggtcaggagattgagaccatcctggctaatgcggtgaaaccccgtctctactaaaaatacaaaaaattagccgggcatggtggcgggtgcctgtagtcccagctactcgggaggctgaggcaggagaatggcatgaacccgggaggcagagcttgcagtgagtcgagattgcgcaactgcactccagcctgggcaacagagcgagactgagactccgcctcaaaaaaaaaaagaagcaaaacagaaactaacagctcctctgaagcttcatctctccaaaacactaaaagatacatgaatatgatacatacattggcacagttacgctgcccacagaacactacgcagtggctttaaaatgaattagttgaggtgtcatgactcacgcctgtcatctcagcactttgagagagcgtggtgaaaggactgcctgagccaggagtttgagaccaacctggacagcatagaaagatactgcctcttaaaaaaacaaaaaaattagtttggttgatggcagctcagtaacaatgacaataaagtcatgggttcagtcgtttgtcagccagcttttctgagccccctggccacagggggccttcaacctcctgcccaaacacaagcacattgccacaaaggtgactgagggaatgaggagtgaaccgtgcaaatccatgcctacaatcaagaaaatgacagccaaccaggactatccttctcttcaggaaaagtgcactaatctctccttctttcctaatctccttctgctttgcctgggaatctgctttgtttcctgggaagcctccaagtgagttcacttgcctaggaaaacagaagttaggaatcactgaggatggctgggaagatgaccaggggccccggtaaaataaatcacatctgcagaccaaaaaggagttctgcatgttaagaaacaattttaggtttctcgtaaagaaaaggttttctccttccatattcaaattgcaaacaatctaaacataattttaaaatattttaatgaggaatactggcacagtaatcatgtatcatcaaattgctgaaccgtttcagagtagacagagtgtactagaaaaatgaacggaagtgaatcgtaagagcctgtggtttctcaaggactgccttgccgccactctcttttctgccctgttctctacagtcaccacccccaaactggtcaggaatgatgtcagtcctccccaaccccagggctcacctgtctcatgctgtaggcaaagaggaagcccatgttgtactgaacttcccggagcaaagagactgtctggacgtgatcttcctccgtctcaccacaaaagccagcaatgaaatcgctgctgaggctcacacctgtgatacacagcaaaggatgacaggtgactgcctgctgtttaccttcaagggaggccttcagcatatgtggattacaagggagggatagcaactgtaaggtcctccctaggactattcataagtaaaacaaaatagtacagagtaaggcgggataggcctgttcacccacagcattccatgacagagatcagcttcttggcctacatttcccctaagcactagaaaaggtatttccacttccaatgctgcatttagggacacagtagggagtccacattttcatatcagtcctcttaccagtgaaaaccttgtggtgcttcatacaaaaatatatttctgaatttggtttgatacaatggtcatctaagacagtagcagccgttgcatgcggtagctcacccctgtaatcccagcactttgagaggccaaggtgggcggatcacttgaggtcaggagttcgagaccagcctggccaataggcaaaatcccatctctacaaaaaatacaaaaattgaccaggcagggtggtattcaagtgtagtcccagctactcaggaggctgaggtgggaggatcacctgagcccagggaggtcaaggctgcagtgaactgtgttcatgccactgcattccagcctgggcgacagaatgataacctatcccccaccaaaaaaattattccagtgacccagtgaggtgagtactattaactccattttacagatgagaaagctgcatcccacagaaatgaagtctcttatctgctatcacacagcctgtaacagtggagcttgacccatagccacatacctagcctctgcattaccctgccctatcaaaacgaaagtatttgtccataaaagttaaaataattaggccaggtgcagtggctcatgcctgtaatcccaccactttggcaggctgaggcgggcagatcacttgaggtcaggagttcgggaccagcctggacaacatggtgaaaccctatctctaccaaaaaatacaaaaattagctgggcatggtggcctgtagtcctggctacttgggaggctgaggcacaagaatcgcttgaacctggcaggcagaagctgcagtgagccgagattgcgccactgcactctatcctgggcaatagagcaagattctgtctcaaaaaaaaagttgtaataattagaaatttgaggaaaaatgtatacaccctcaaccaaatctaaactaaatgactacagagtattttattaggaggaaggggacagtgaaggggaatatggaataagataatacgaaaggaattatctctaaaatttacagtaataagttgccataaagctagttagaaaaagtacacattttactgctgatctgtacaatcatctttatacctacatttcctcatttcatcaagacttctctgaagcatatctgaaaataaacaacactgtaactgctttcttttcccacctaacctggaagttccccaaaggcataatctaagtgttattctctccatattatgcttaaagtattctaactcaaaagtgattttaaaatgtatctgtaaaatcggcctcaaaaagaaagtcaaatgtggtataaaatatagaaaatgaagatgaataaataagaatagtaagttcttatttctaaaaaaaaaaaaaaaagatatcaattgttctcaaatcagaactaatttagacataactttgtcaccttacaagataagataaggtctttcctctatgtccagatacaaagaccatagaaaaggaatctctatagccttgaggccacaaggtgatccacacctaagtacttccagcaggactaagacaacaaaaaatcagaaagacataaaagaaagaatacgaggagagagaaagagaaagaagaagagcacaaaagttatgaaactgtgtcacaaggaaatgccaaaggtgttgactgtatctaaccacaaggctggtcactggtagagtaacatgctcagcagaatgagtttcttaaatgtacctggaatagattctctaatatggtgaactaactccacataagcttctcttgaatatctgcaataaagaacaaaaggaaaaggcctacataaatccaacctttttaaatgaatgctataaaaagataacactatgaatttccacatgtaatcacttctcatccacatggcagggcacacgagtaaattaaagtatccaaaagagcccttttgatctaagctgtatcttctaatctaatctagagcctatgaatttttatttaaggacataaactttttttttttttttttgagacagagtctcgctctgtctctcaggctggagtgcaatggcacaatctcggttcactgcaactcaaattcctgggctcaagtgatccttccacctcagcctcttgagtagctgggaccacagatgtgcgccaccacacccagctagtgtgtgtgtgtgtctgtgtgtctgtatgtgtgtgtgtatgtgtgtagagactgggtttcgccatgttgcccgtgtgtgtgtgtgtgtgtgtgtgtgtctgtgtgtgtagggactgggtttcaccatgttgcccaggtgtgtgcatgtgtgtgtgtgtgtgtgtgtagggactgggtttcaccatgttgcccaggtgtgtgtttgtgtgtgtagagactgggtttcgccatgttgcccaggtgtgtgtgtgtgtaaagactgggtttccccatgttgcacaagctggtctattctcaaactactgagctcaggcaatctgcccaccacagtctcccaaagtgcttggattacaggcagaagccacagtgcctggccagcataaactattctaaatagctttttttatttaactaataaatctagacagattaaacattttagaggacctctaaaatactatgccctgtggaaaacaagacaaagcactaattccatacagcttgccttgggacagattctcccttcagtctcatctgtgtaatacttattattctcaaagaaagtgaacacatagagcgacatttaaattccaagatgtaacaaaaccttaatgttaacattaaaaaattaaaatctcagagtgtgccacaccataggtgcttaattaaaaaaaaacatactaaacagtgaaaatggatgacccagtccttagcctatgttatggagttagcgaagcaagctccagtgccctgtggcttagtcatacaataaatacttactgtcacacagtggctgctcagtaaatatttatgctttttaaactaaacagtgaaaatgggtgaccagtccttagcctttgcttatgaagtgagcagaagcaaactccagtgcccagtggcttagtcatacaataaatatttactgagcagctactttgtgccacacactatgctaggttcttggcaacaaggacactgtttggtcattaaggaaacatggaaaagtgagggatgccccctctccaagcaagcctgaccccctccgcatggcctccaacacacggctgcttccactctgggctggcaggtggatctgtttacagatgttatctctctcatgaatcagctgcagaacctgatgaaacagaacacattataggtaatcacaatctcaccaaagaaccttacagaaagcaataccgctcttactatgtatcctccaaggtcaattttcacataattaagaggctaattaaaccagacacacaaaatcacctattccctaacttttgttcaagccccattctatttgtctcagacacttcacctgatggcatctctgctttcaaagagtagagagaagaaagtaagcagaggtcagattaaagccatgggagctgaatacaggtagtgctgacactagggtcagcaggcaaagcaggaaaaaaatggcacttctttcagctagcttacaaagcagtcactttctattttttttttttttgagacagagtatcactccattgcccaggctggagtacagtggtgccatctccactcactgcaacctctgtctcctgggttcaagcgattctcctgcctcagcctccccagtagcagggattacaggcacaaaccaccacacctggctaacttttgtatttttagtagagatgatgttgcccaggctggactagaaatactgacctcaagtgatccgcctgcctcagcctcccaaagtgctgggattacaggcgtgagccaccacgcccagcccaaactagtcatttttaaagataccatcaggtcaggtgtcatggctcacctctgtaatcccagcactttgggaggccaaggcaggaggattgcttgaggccaagacttcaagaccagcctggacaacatagtgagaccttgggtctattttttttaatttttaaaagaagaaaaaagaaaaaaaaagataccatcaaaaaactgatactaggggaaaatatttgaaaacatattgacaaaggatttgaaccaagaatacataaagaggctgggcgcagtggctcatgcttgtaatcccagcactttgggaggctgaggtgggcaaatcatttgaggtcagcagttcgagaccagcttggccaacatggtaaaaccccgtctctactaaaaatacaaaaattagctggacatggtggtgtgcacctgtaatcccagctactcaggaggttgaggcaggagaatcacttgaacccgggaggcagaggttgcagtgaggccagatcacaccactgcgctctagcctgggtgacagagcgagactccatctcaaaaaaaaaaaaaaaagaaaaagaaaagaaaagaaaacataaagagaacacattccagtctctctcctccattgcaagaaaggctcctttgcagtggtcaaaaaaataaaggatatgtaaagaacttttacaactcaataagaagacaatccagaggaaaaaagatgaaagtcggggccaaaagaaagacttttcactgaaacaaaaaacctccaaaaaaaggtttcagatgtgggctacctactccatgccaggcactgtgctaagtacctttgacacaatataggcatacctcagagatatcacaggtttggttccagatcaccacaatgaagagaatattgcaataaagtgagtgacacaaattttttggtttcccagtgcaaataaaagttatatttactctatactgcagtctattaagtgaaagcaatgtacataccttaatttcattatatttatattttttaaatatatcgagatagggtttcactctatcaccctcgctagagtgcaatgaaactgtagctcaccccaaccttgaactgctaggccaagcgatcctcctgttccagcgtcccaagtaactacgactacaggcatgtgccaccatgcccagctaatttttttatttaaaaattatagggccgggcacagtggctcacgcctgtaatcccagcactttaggaggccaagatgggtggatcatgaagtcaagagttcgagaccagcctggccaacatctctactaagtctctgctaagaatacaaaaattagccaggcatggtggtgcatgcctgtagtcccagctacttgggaggcaaggcaggagaactgcttgaacctgggaggcagaggttgcagtgagctgagatcgcaccaccgcactccagcctgggtgacagagcaagactcagtctcgaaaaaaaataaaaataaaaataaaaaataaaaactataaagttgttatgctgcctgggctggtgtccaacttgtaggctcaagtgattctcctgcctcaacctcccaaagtgttgggattacagggatgagccaccactgaatattttaagctcactgttgagacctactgcttaggaaaaaagattcctttctaaatatgactgctcattgacaacgcacctggtcatcccagagctctgaaagagatgtacaaggagattattagtgtcgtttttatgcctgctaacacaatatccattttgcagcccatggatcaaggagtaatttcaactttcaagccctattattttaatttttagtttatataagatcaattcttattatttaagaaatatatttcataaagctatagctgtcgtagatagtgacttttgtgatggatctgggcagagtaaactgaaaacattccggaaagaattcatcattctagataccattaagaacattaatgattcatgggaagaggtcgaaatgtcaacattaataggagtttggaagatactgatttcaacattcatggatgattttgaggggctcacgacttcagtggaggaagtaacatcctctttagcatcattcttaagggccctaggattttcagaatggcaaatcaacactggcttcaacttaaagtcaccagctgccttggcccctaacaagagagtctggctgggcacagtagctcccgcctgtgatcccagcactttgagaggcctaggtgggagaactgcttgaggtcaggtgttcaagaccagcctgggcaatacggcaagaccccacctctaatttttttaaaaggaaacaagagacagagtcagcctgtcctttgaagctttgaagaatggcactgatttctcttctctagctatgaaagtcccagatgacatcttcttccaacagaagactgttcatttacactgcaaatctgttgtttagtagaaccaccttcagcattgatcttagctagatcttctggataacttgcacagcttctacatcagcactatggcttccccttgcactttgatgttagagagatggcttctttcctcaaaccttgtaagtcaacctctgctagcttcaaacttttcttcttcagcttcctcacctctcttgggcttcagagaactgaagaggggccttgctctggattaggctttggcttaaggaagtgctgcggcttctttgatcttctctccagatcactaaagctttctccatatcagcaaaaaggctgggttttgttgttagtggtttttttgggttttcttgtttttctttttgagatggagtctcactctattgcccaggctggaatgcagtggcacaatctcagctcactgcaacctctgcctcccgggttcaagcaattctcctgcctcagcctcccaagcagctaggattacaggtctgcacaaccaaacccagctaatttttctatttttagtagagacagagttttgccatgttggccaggctgatctagaactcctgacctcaggtgatccacccaccttggcctcccaaaatgctgggattaaaggtgtgagtcactgcgcccagcctgtgagccatcacacccggccaaagaggttgtgttgttttcttatcattcatgtgttcagtggagtagtacttttaatttccttcatgaacttttcctttgcatttacaacttggctggttgacataagaggcctagctttcagcctagctcggctttcaacatgatttcctcagtaagcttaaacatttctggcttttgatttcaagtgagagccctgcgacccttcccttcacttgagcactttagaggccattgtagggtgattaaatggcccaatttcaatattgttgtgtctcagagaatagggaggcctgaggaaagggagagagatgggggaatggccgtctgtggaacagtcagaacacacacatcatttaccaatttaggtcactttcttatgtgggtgtggctcatggtgttccgaaacaattttaagaataacattaaatagcactgatcacagatcaccataacagatgtaataataatgaagtttgaaatattgtgaaaattaccaaaatatgacacagagacatgaagtaagcacatgctgttggaaaaatggtgctgacagacttattcagagttgccacaaaccttccatttgttaaaaataactccataatatctgcagagtgcaataaaacaaggtatgcctttgtatctatttcacaacaacccaaagcaggaggtaattgttaaccccttattaaccccattttacagataaagatgaaaagttgaaaacatcacatgctcgctggtaaaacagtggaaaagctgagatttgaacccgggtctgaggcgaaagtctgggctgtttcccagagcaccacatcacctccttcctgtccaccccacaccaccattaccgccccaccaccattattaccactcagctgcccactttgtaacaaatcctctctgtacagccctcacggtcccgcaggtggtcttaacctcccgctgaatatcagtcctacctccactcccaccttggcagacttttttttcgagacagggtctcgctatctcacccaggatggagtgcagtggtgcgatctcggctcactgcagcctcgacttcctgggctcatgtgattctcccacctcagtctcccaagtagctggaactacagtcgtatgccacctcagtctcccaagtagccagaactacagtcgtatcccaccccacccagctaattttttgtatttgcagtagagacggggtttcgccatgttgcccaggctggtttccaactcctgagctcaagtaatccacctgcctcagcgtctccaagtgttgagattattggtgtaagccccgtgcccagccactggtggacttcaaatcttcaaaggaccagcagatctggagggtgatgcagcaataccccacaggatccctaagcaggactccaggtctctgctgcatccctactgggtccagcctttggcatgctcaagaatactaatatcagtttgtcacagctaacctgacgctcacctcatcaggaaaatccttggggtggggagaggtaaaacggatcctcatttcaggatctactctggagacctgatccagaagatgagcaaaacgaagtcctccttgcttggttttatagttggtggtaaagccacgactgagattggtaggcactgcactgttgaactggacctccgaattgtcccgaaaactattaacattctgaccaagaagtgtcacttctttcagcccctaaacatgggaaaatatattggaattttaaaacttttgggtagcttcataaaaaaacactaattaaaaattagctgaaattaacatatcttttgttttaaacaaaagaaaaatcgaacctaccaagagtcacctataagtgtgttgtgtctataaccgaataatttcaagcttagacatcttacctaaagagctaaacctaataaagccttatataaaaattaatcttcaaaacattatttagaatcaaaactggaaacaaactcaataatccacaataatggttaatttatgatagatctgtcatttgaatgttatacaccatgactatataaagtattctcaccagaaatatttaacctgaactaatcaagcttttacacctaacttccagttactagaattcacagagatatattaaatgacaacatgaggaaaaaatcagacaaaggagactcatgtctgatctcttcaaaaagttaatgcatcatttaaagaaaacaacaacaacaaaaaataaaagagctgttttagatttttttcttcttcttcttgagacagggtctccctctgttgcccaggctggagtgcagcagcacgatcatagctcactgtagcctcaacctcccaggcttaagcagtcctcctgcctcagcctcccaagtagctgggactacctttttttacttttgtagagatgggatttcaccatgttgcacagactggttttaaactcctaaactcaagcaatcctcccacctcagcctcccaaagtgtctggcttaaataactattgattttcatacatatgataatgatatcatggttatgaagagaaaaattgttactcatagaagatacatactgaagtatctaggggcaagtgtcctgaggtctacaaattacttcaaatggttcagaaaaaatacatttatgggtgcatggagataggtgtatgacaaaatgttaacaatcacgtttttctattatactagtctttctatttgtctgtttgaaaatttatattataggccaggtgcagtggctccctcctgaaatcccagtactttgggaggccaaggtgggcggatcacacggtcaggagttcagaccagcctggctaacatggtgaaatcccttctctactaaaaatacaaaaaattagctgggcgtggtggcaggcacctaatcccagctactaaggagggtgaggcaggagaatcgcttgaacccaggaggcagaggctgcagtgagccgagaccatgccactgcactccagcctgggcaacagagcgagactccatctcaaaaaatagaaatgttatattataaagtttcacaaataatggttgctaaaaaagacttgttttgtaactttgacataatttacagacaaactgcaatattaaaagaattcccatatactctttgcccaaattcatcaaatgttaacactgcaccccatttgtttatcattcacattcagacactcatatacactctctctcaacacacatatgactacattttttttaagccttctgagaaaaagtcacagatatcatactcttttacttccaaatattttagtatatatttcttaaaaacaagggcattctcctatataatttcaggacaattatcaaaatcagaaatattgatacaacactattatctactttccataaatcaaatgttaccaatagtccaaataatgttttgttgttgttgttgttgttattgttgttttttgagacagagtctcactctgttgcccaggctggagtgcactagcgtgatcttggctcactgcaatctccgcctcccaggttcaagcgattctcctgcctcagcctcctgagtagctgggactacaggcgtgtgtcaccacgccaggctaactttttgtattttttagtagagacgggttttgccaagttgcccaggctagtctcaaactccggagctcagacaatctgcacaccatggtctcccaaaatgctaggattacaggtgtgagccaccacgcccagcccaaataatgttctttataacatttttttccctgatcagaatcccaatcgaggaccgtgcgatgcatttagttgtcataactccagtctccataaaggctatttatttgtgtaagttgtgacatactgttaatctaaaaagcaggatatactaaatgcaatgtggatcctagattggatcctggaaacgaagtaagacattagtggagaaactggcaaaatccaaataaagtctgaagagagttaatagtaacataccaatattaatctcttagtttttgctttgtttgttttgtaatagagacagcagctcccagtgttgcccaggctggtcttgaactcctacgctcaaggcaccctcctgccttggcctcccaaagtgctgggattacagcaccaaaaaatgtaccaaagaaagatggcaatgctcgaggaaactctctttgcaactttcctgtaaatgtaaagtcattccaaaacaaaaagtttattaaaaagtaggatataaaactaagtaaaatacacacacatatataaaaagacatacaaaccaaatgcagaatgacttaaggaacaattggggaactccgaataaggatgaactggaatgagacagtatttagcaatttttgttaatcttactggaagaactaatggtattaaaaatattcttggccagacacggtggctcatgcctgtaatcctagcactttaggaggccaaggcgggtagatcacctgaggtcaggagttcgagaccagcctgcccaacatggtgaaaccccgtctctactaaaaatacaaaaatgagctaagtatggtggcgcatgcctgtagtcccatttactcaggaggctgaagcaggagaatcacatgaacccaggaggtggaggttgcagtgagctgagatcgtgccattgcactccagcatgggcaaaaagagcaaaattccgtctctaaataaataaataaaataaaataaaaatattctttagcagcacatggtggtacgtgcctataatcccagctactcaggaggctgaggcaggaggatcacttgagtcccgggggcagaggttgcagtgagccaagatcataacactgcactccagcctgggcaacagaacaagactctgtctcaaaataaataaataaataagtaaataaataaataggccaggcacagtggctcacacctgtaatcctagccctttgggaggctgagccgggtgaatcacctgaggtcaggagtttgagactaagcctggccaacatggtgaaaccccatctctactaaaaatacaaaattagctgggtgtagtggtgcacacctgtaattccagctacttgggaggctgaggcaggagaatcacttgaacctgggaggcggaggttgcggtgagccaagattgtgccattgcactccagcctgggcaaaaagagcgaaactccatctcaaaaataaataaataaataaataataaaaagatttttaaatgtttaaaaaagaaaatatccttattttttagagatgcatactgaaggatgaaacaacatgctctactttgaaatacgttttcaataagaaaaaaataaatgaggccaggcgtagtgggctcacacctgtaatcccagcactttgggaggccgaggcgggtggatcacttgagatcaggagtttgagaccagcctaacatggtgaaaccccgtctctattaaaaatacaaaaattaagccaggcacagtggctcttacctgtaatcccaacactttgggaggccgaggtgggaggaacacctgaggtcgggagatcgagaccagcctgaacaacatggagaaaccccgtctctacttaaaaaatacaaaattagccaggcgtggtggcgcatgcctataatcccagctactcgggaggctgaggcaggagaatcgtttgaacccgggaggcggaggttgtggtgagccgagatcacaccattgcactccagcctgggtaataagagcaaaactctgtctcaaaaaaaaaaaaaaaaaaaaatcagccaggtgtggtgccaggcacctgtaatcccagctactcaggaggataaggcaggagaatcgcttgaatctgggaggtggaggctgcagtgagccgagatcataccactacactccagccaaaaaaaaataaaaaataaaagtaaatgaaacaaatatggcaaaatgcaacaattgttaaatttaggtgattgttagctggggcagaggggtcattatactattccctcttttcagtatatttaagtatttttcatataaaaagattaaaaagactttttataaaagttgcttatttagaagacttccaatagataaccattgtttgaatgaataaacggacattctgttaaaggtacaatattctatactctttgcaactgtagtctaaaaaatctaaatgaaagaaaaaaaatctttaaaaattactaaacaagcaaaattattaagtgactaacagatactttaaaatacaagtaaaatcttaattttccacaagtctatggccttgaattcactaagattcactttaatgttattaagttccttcttttataggcaaatggcctagaaaggttggggagttttgtcaccatctcagtctatttaaacagaatgtctctatcctgaaggagtgagttttggtactgagggagagctggaaggggagaggaaggagacaactttagaccaggaagcacttggagaggtggggtatggaaaatgcctcacagagcaggggagcagctaggggccaaatcaaggaactgattatctgggggtagggcaagagaagacagcactgccagaatgtgaggatgatagcaaactggtgacttagaactagagcagggaggccaggcacagtggctcatgactgtaatcccagcactttgggaggccaagacagtaggattacttgatcccaggagttctagaccagcctgggcagcatagtgagacctcatctctacaaataattaaaaaattcactgggcgtggtggcacctacctgtagtcccagctacttgggaggctgaagtgggagaattgcttgagtccaggcaggtgatgctgcagtgagctctgaccacaccactgtactccagcttgggtgacagagtgaaagcccgtctcaaaaataaaaaataaaaaaagaactggggcaggggctaccctggccctctcccatgattcctgagccaaacaagtaaggaagcagggagacaccactgttaggaaaagccaccatattcccacctattgtcctcttctgcaggggtagcagattcaggcccggggctaaggaaaagacctcctcaaaagctgaggaccagctcccagtgggagaaagaagagcagatctcccctgtggcttctgatccaccttactcccctcatctattctgtccctcaactagtgagctggctcagtgataaaatgaacaataaatctgggagtttttcctggaagagacaaattcataatttctcaaaaacttagctatgtgccaggtaatttaaaaacttttcctccaatccttctaataaccctgcaagcaaggtattattttattctcttttcacagatgaggaaactgcattacgacgacagttaaattgacatgcctaggaaccaagccagaattcacactccatcacctgactgtaatctcatgccctctccatccaccatgctgcctccatagtggagctctgtaatttgtgggcaataaaccaatgatgtacacaaaagtagttctttctggccaggcatggtcctaaactttaataagtcagagacagcataggctcaaaactacaaaggttatcctcatcctcccccaaacatgttcacagcaagaaagcctggagaactcttcacctgctcagaaagcttcttcacttcctctagaatggaggcaataggccgactcctctccctgccccgggtgaaaggaacaatgcagtagctacacatgttgtcacagcctcgcatgattgacctggagaagaaagtaccagaacttagtaacagtagcagggtgtgctggtatgacccaaggagcaggactcagcttcaatagcattattctttggctctgaatcctcttgccacaatgctcacactggaccaatctgagatctaagcactaaagtagaccttttttatctttaaaaattggtatctaatcacaaaatataaaccaaactataaccagtgggacaatgactagcctgaggaagcacagcggtgaggagctagaatatacacttaccacacttggactttctactgtttttttgttttgttttgtttgagacggagtctcactctgtcaccaggctggagtgcagttgcaatctcggctcactgcaacctccacctcccaggttcaagtgattctcctgcctcagcctcctgagtagctgggactacaggcgcctgccaccacgcccggctaatttttgtatttttagtagagatgggatttctccatgttggccacgatggtctcgatcttttgacttcatgatccacccacctcagcctcccaaagtgctgggattacaggcgtgagccactgcacctggcccctctactgtttttaaattcttttttccagacagcctgaatatgtttgtacctactgtttttatgagtatattatctgaactttttacatccagaccagaaaaaaataaatattataaagtgtgtgtatatgtgtgtatatagggcaaggagaccctggatttaaaacacagaattctacatttctcacgccttcctgatccaactgttaggtatcgaagttaaatcgctctctttaattcacatcctgtatgtgaaagcctcaatctatctgaaggaaataattacggctatgtatcaaagacgttcactgaagaattatgtaataaatgttagctattattcttactaagcattccaacaagagaatattatatagccattaaaataaacagaggttgacaaacttttctgtaaaaaaaaaaaaaaaaccctatagtaaatatttgagacttagcaggctatagtctctgtcccaagtatttaaccttgctttagtggcaaaagcagccagaggcaatatgtgaataaatgggcatgcttgtattccaataaaaccttatttacaaaaagaggtagtaagctatttggcaacctctgttacagaaaatttaatgccatggccaggcgcagtggctcacccttataatcccaggattttggaaggctgaggtgggaggatcacccaagctcaggagtttgagaccagcctgggcaatatagtgagaccctatctctgtaaaaattcaaaaaaaaattagccaggtgtgggggtgcacacctgtagtcccagctactcaggggactaaagcaagagcccaggaggtcaaggctgcagtgagccctgatcatgacactgcactccagcctggatgacaagagtgagaccctgtctcaaaaaaaaaaaaaaaagtgtgaaaggaggaagaggcttattccctatctcttaggcagtgactcacacaaaggcagacgtggcactggcgcttgtctggactggcatgacatcagcataggtctcgtccagagagagcagcacgttggcagcttgctggcccgactcagcaacagccagcagccggggaaggtcccggtaggcatcaggaccagccaaaatatctaccattttctctctgttgagaatctcctccttcaacctctcagccatgcagcctggaagggaaaaagaaacaagcacctttccccaaatccacctggtgtttaatggcttcttcttattccactttatctgtagctgggattagagaccagggcacagaaaacttctctaagaattgagtatcatccttcaaatttaaccaacactcccatcgcactggagcctgtatcttcctatataagaaaaccacagaaaagggttccagagcaattcaattaaatgcccagaaaaaaattaaaccaccagccaggtgcggtggctcatggctgtaatccccacactttggggggccgaggcaggcggatcacctgaggttgagagttcaagcccagcctgaccaacatagagaaaccctgtctctactaaaaatacaaaagtacccaggcatggtggcacatgcctgtaatcccagcaacttgggaggctgagggacaggagaatcgcttgaacccaggaggcagaggttgcggtgggccaagatcgcaccattgtactccagcctgggcaacaagggtgaaactccgtctcaaaaaaaaaaaaaaaattaaaccaccacccacaaacctttcaagacatgaaccatgtcttctttcaactgaaaattacttagtgctgaaataaaaagtattctgtgtctggaacttacttacccacaactacacttgaaccctttccctctcttctagcctataatacttgctaaaacctgtaagaaatgagtaagccatttatgctgttatcttccatatccttaaaaaaattatgttattaaagttataatatcttaaagtccactttattacaaataccctttgaaaacacttaacagctattcttgtttgtatgcccatgttcatagcactattatccacaatagccaaaaggtgcaagcaacccaagtgtctattaatgaatgaagagatatttgcatctacgcaaagccagttaaataaataatttttcagctccctctccctctccctctccctctccccctctccctctccccctctccctctccctctccctctccccctctccctctctccttctccctctccccacagtctccgtctccctctctttccactgtctccctctccctctctttccacggtctccctctgatgcccagccaaagctggactgtgctgccgccatctctgctcactgcaacctccctgcctgattctcctgcctcaacctgccgagtgcctgcgattgcaggcgcgcgccgccacgcctgactggttttcgtatttttttggtggagactgggtttcgctgtgttggccgggctggtctccagctcctaaccgggagtgatctgccagcctcggcctcctgaggtgccgggattgcagatggagtctcgttcactcagtgctcaatgttgccaggctggagtgcagtggcgtgacctccgctcgctacaacctccacctcccagccgcctgccttggcctcccaaagtgccgagattgcagcctctgcccggccgccaccccgtctgggaagtgaggagcatctctgcctggccgcccatcgtctgggatgtgaggagcccctctgcccggctgcccagtctgggaactgaggagcgcctcttcccggccgccatcccgtctaggaagtgagcagcgtctctgcccggccacccatcgtctgagatgtggggagtgcctctgccccgctgccccctctgggatgtgaggagcgcctctgcccggccgcgaccccgtctgggaggtgaggagcgtctctgcccggccgccccgtctgagaagtgaggagcccctccgcgcggcagccgccccgtctgagaagtgaggagcccctccgcgcggcagccgccccgtctgagaagtgaggagcccctccgcccggcagctgccccgactgggaagtgaggagcgtctccgcccagcagccgccccgtccgggagggaggtgggggtcagcccccgcccggccagccgacccgtcagggagggaggtgggggggtcagcccccgcccggccagccgccccgtccgggagggagtagggggcagcccccgcccggccagccgccccgtccaggaggtggggggcgcctctgcccggccaccccttctgggaagtgaggagcccttctgcccggccgccaccccgtctgggaggtgtacacaacagctcattgagaacagaccatgatgacgatggcggttttgttgaatagaaaagggggaaatgtggggaaaagatagagaaatcagattgttgctgtgtctgtgtagaaagaagtagacataggagactccattttgttctgtactaagaaaaattcttctgccttgggaaaaaaaaataatttttcaatgaacaaacaaaatgtactacatatacacaatggaattttttttttttttttacaacggagtattactcagccttataaaggaaggaaattctggccaggtgctatgggtcacacctgtaatctcagcactttgggaggccaaggagggtggatcacttgagcccaggagttcaggatcagccctggcaacatagtgagacccacatctctacaaaaaataaaaaaattagtcctcgtggaacgtgcctgcagtcccagctactcaggaggctgaggcaggaggattgcttgagcctgggaggttgaggctgcagtgagccatgatcacgccactgcactccagcctgggcgacaaactgagaccctgtcaccaaaaaaaaaaaaagaaggaaattctgacacaggctacaacaggtaacctcatgaaccctgaggacattatgataagccaaataagacagtcacaaaaaagacaaaattgtatggttccacttacatgaggtatctagagtagtcagattcataaacagaaagtagaatggtgattgccaggggctgagggaaggaggaatggggagcgtgtgttcaatggatatgtagtctcagtttgggaagagaaaaaagtcctgcagatggatggtggtgatgggtgcaaaacaatgtgaatatacttagtgccacagaaatatactattaaaaaggattaaaatggtaatttcatatatattttactacagttttttaaattattcttgggatttctgaaattcttattagatatacaccctgaggcttctacagtgaaggaactgaaatggaacagaacatttcagctgacccttccatcctcctgcgtcaattactacatggatctgataactaaatatgctccatctgtgtgtggacccatcgttaggagagattaatttaactattccacaatggagatagtctgtttttccataatgttaaatacattaactaaattctgagacagaaaagggtagagaaatgtctccagtcatatagatcagaactgcccaacataactttctaataagatgataggcctggtgcagtggctcacacctataatcccagcaatctgggagattgaggcaagaggatcacacttcagcccagaagttctagaccagcctgggcaatatagcaagaccctgtttctacaaaaggtcaaaaaattagctaagtgtggtggtacacacctgtagacctagctacccaggaggctgaggtgagaggatcatttgagcccaggagttggaggctgcagtgagccatgatcatgccactccagtctgggcaacagtgtgagactctgtttttaaaaaaaaaaaaaaaaaaaaaaaggatgacagagtgtgctggatggaaaaataattgcgctgtacaaactggtagcccctagtcatgtggtcatgtgtggctactgagaagttgaaatgtggctaatggaactaaagaagtgaattttaaattttatttaattataggtaaatttaaatagccacatgtggctagtggttaccatattggtgaggcagacctaaatcttcacttgagcttgcttcaggagtcagaatgaaaggtacccacattagaaatttgtgctgtcaggccaggcacggtggctcatgcctataatcccaacactttgggaggctgaggcaggcggatcacccgaggtcaggagttcgagaccagcctgaccaacatggggaaacccgtctctactaaaaatacaaaattagccaggcatggtggtgcaagcctgtaatcccagctactcgggaggctgaggcaggagaatcacttgcacccaggaggcagaagttgcggtgagccaagatctcgccattgcactccagcctggacaacaagagtgaaactccatctcaaagaaaaaaaaaaaagaaattcaagctgtcccttcagactccaactctacccataactctgtgctaccatgagccgcattagactctaggcaggatataccactttctgagcacctattacttcaaggaactacggaaagccctttcatgaactttatctcatttaatcctgtcacctctggcagtaagtacaagaattgcatgggatatataagatttcttcagacactgggaatccagcctctaaaggaaacactagcaaataaagccacataaagtccaagtttcaaagctgacaaaatgtgcaaattaccagatacctagaattccaatcctcagaggaacccgggagcggggccgccttgtcttcaaggctttaagctgatgtaaacggttccagatggtctgctcagccttctccctagagagatcaaaggaggcaagactgaaccaaaaataaaccacagaggtatctaagagagtaggtcagtgggaagaaaataaaaaccaccttcaaccctttaaatcaagcttttccaacctgcagcccacgggccacatgcagccaggatggctttgaatgcagcccaacacaaattcataaacttttgtaaaacattaggagatttttttgggggggattttttttttttttttttttttagctcatcagctattattagtgttagtgtatcttatgtgtggcccaagacaattcttcttcttcttccaatgtggcccagggaagtcaaaagattggacagccctgccttaaatgtgtatctgccattcagacttacggaaggtaggtagggggccacctgaagaagcaacacttgctataatttacctttcctaaaatgacatccttcctacacatcttcaaatcctgaaaagcctttaagccaaactcaaaaacaatctacttcacaaggccttccagttctcctctgttggacagtttgtcctccctttaactgcccttcaactttttttttttatgattccagatcctaatgcccttctactttaactagatttttccctatacttagcaatttctccttttttttttttgagatggagtctcgctttgtcaccaggctggagtgcaacagcgcgatctcggctcactgcaacctccaactccctggttcaagcaattatcctgcctcagcctcctgagtagctgggattacaggcgtgcaccaccacgcctggctaatttttgtatttttagtagagatggggtttcactatgttggccagactggtcttgaactcctgacctcatgatatgcccactctggcctcccaaagcgctgggattacaggtgtgagcaaccgtgcctggccagcaatttatcttttatttttctttgtagatacagggctttactttgtgcccaggctggtcttgaatagttcactgtagccttgaactcctggactcaagtgatcctcccacctcggactccaagagtgctgggattataggtgtgacctactacacccagcctcattgtttgattttttttgaactagcattttttgccagatgttggagctatttgttcatctatcttagttcccatatcagactaggctccttaaagccaggccatggaagaagggttcatttcggaatcacccaaagcacatagttcagtgtcaagcagcagaggcctacagaacaaaaatgtcagatgaattaattgacagtatagccggatagggaaacattaacactagcatgtcttgaacacagaaacaaagtgagaaaggaggtacgttcacctctgatgggagtcacccatctctactcaaaactccccaagcctatgactacatcctaccccgggcagctatattataaacatatgccattagttacaaaacaaagctcaggaagagctgagtggctcggcacattcttggtgtcctcatctataacagcaccaaccacacagggttgttgtgatcattaaatttgttaatgcattatgttactcactcagaacctgacaccacggtacatgcccagccaatgtcagccagttgtataaagactatctccactgtgggaaaactgcaagtcctactgccatggggccactggctcatctccatagacagccaggccaggcactgttagctctggcattattacataaaatacattcactcctaggaaaagaacaaattcgcacctgatagagcatgtgacaaggagaatcacatctgcctgaatggaaagaaaggaaaacaaggaaaattacataatatcttggatattagccttgtacaattcctgccctacagctctttattatttttttttcctttttttttttttgagacagagtctcactctgtttcccaggctggagtgcagtggggcaatctcagctcactgcaacctccacctcccgagcggttcaagcaattctcctgcctcagcctgggattacaggtgcccaccaccacgcccagttaatttttgtatttttagtagagatggggttttaccatgttagccaagctggtctcgaactcctgacctcaagtgattcacctgccttggtctcccaaaatgctaggattacaggcatgagccactacacccggcctattatttttctttaactatttttttcctttttttttttttttaatagagaaaggagtctcgctcacttgcccaggctgaagagcaatagcataaccatagctcactgcagcctcaaactcctgtcttcaagcaatcctcctgccttggcctcccaaagtcctgggattacaggcatggtgacccacacctggacattttaaccatttttaagggtacagtcctgtggcattaagaacatctgcaatttcataactacgcattttccataactttttcatcttctgcaactaaaaccctgtactcgttaaacagtaactctccaacttccctctccacagccaattcttaacttagctccttgtctgaaggcgcacatcaccataaaagtttcaaaaacagctggaacaaaagtacaactcagtcccatggtgaacacttcacccaagggaactctctctcaccagggggcaccctgctcctgaaactacacctaagaactggcacaaatgcagaatcttgcccaggtccaggaaacaaaggaaataggaaatgcatgtacctcttggaggttactggtccgcaggtagccactcttctgtaagatggaccaggctatctctgtgtcattcacattcatctggcagccataggtctcgaggtagactgcagtgagaggttggggggaatccatggtagacagacaacaaggggtctcgtgtctcaaaaggtctccttcccaaatgctctagaaatatctgaggcatctggttatccactaagtcccctattgcttcaatcttaagataacataaattgccagatgtacccccaagttaatgatagaccttcagaacaaaagaaataccatattaggctgggcacagtggttcatgcctataatcccagtactttgggagactgagacaggaggattacttaagcccaggagtttgagaccagccagggcaacatagggagaccctgtctctacaaaaaatttaaaaattaggcaagtgatacatgcctgtggtcccagctactcaggaggctgaggtagaactgctcgagcccaggagactgaggctgccgtgagccatgatcacaccactgcactcagcctgggcaatagagtgagaacctgtctcaaacaaacaaaaaaatataccacattatatatccacaccaattacaagccatgttatcttttaaatggggaaaacatgtacctgagaatcaaggaaatatagttataaaaacaattagaaaaggaaggactaggccgagggtggtggctcacgcctgtaatcccagcactttgggaggccaaggcgggcagatcacttgaggtcaggagttcgagaccagcctagccaaaatggtgaaacccaggtctccactaaaaatacaaaaatcagccaggtgtggtggcgtgcacctgtaatcccagctactcaggaggctgaggcaggagaatcacttgaagccaggaggcagaggttgcagtgagctgagatcgcaccattgtgctccagcctgggcgacagagcgagactcaaaaaaaaacaaaaaagaaaagaaaaggaagggctaactgatagtgttcatcagcctgaagggaaaataagtttaaatccacatgttacactcctcctcaaaataaagaggttttccagcctctggaagtagcagcagtggccagagggtacataaagtcacaaaattaaaatgaggcatcttcttacagtaacttcatcttaaatgaaagcaaggctatattatgaagtaaaactaattttgtacacagttgtaagaatatgaatttcacattctggcagcttcaaactatattccaagatcaacccccgtccccaccagcaggtcttatttccagactccaataaattccaactaaaagttaagagctgaatgataatcagcttttgatcaaatgattctcccacctcagcctcctgagtagctaggactacaggtgcacactatcatacctggctaattttttattttttgtagagacagtgtttcaccatgttacccagactgttcttgaactcctgggctcaagcaatccacccatcttggcctcccaaagtgctgggattacaggcatgagccaccgtgaccagtcgagtttcttgatattaatattacttggtggagtctaatgattcccacagccttcccacactgttaaccttccaagccagttctgtaataaaagaatcatgccaggaatgacagagaggagcaaggcaggaagcccaaagggataagcgaagtaaaaccaaccttttctctgccttccaagaagttcatccatcatgagatagggaggtgggtcttccacttctgaagacagcttctcctgaggagctgaggcactttttaaaaaatgttgaaaagtcggtccagcagccagcctggagctgaaatccttccgagctccatcctcctgcctctctggactgggacacatggtactagagagactgctgtgtgccctgcacatcctcagcgacagccaagacacagaggccaatggtccccaccccagagacctctgcacttggaggacacactgtaaagggtgcatggcactaaacagcccacagtctgcaaaagaatgacagacatcaccagcatttattgaacactatggacaggacactgctgtgagcacttcaagtgtatacatctatttacccctcacaaaagcccatgaagaaggtactcctaataatatgacctctgttttacagttgaaaaaaactgaggcaacttgcccaagaccacacaaaggagtgccagagatgagatgcaaatccaggcagtcttttcaaaacaaggggtggtagagatgagatggaaagccctgacaaaatgacaaaatagcaccttgtgccaagaccagttcccaaggctttaagtgtattaactcattaaatctttacagcaatcctaggaagcagatactattattgttcctattccgaaagacataggttgaggaactcacctaagctcctacagccagtaagcagtcaaacaaggactcagataaaaatctgtatggatgcaaagcccgtgccactacccatcttgctacactgcctcttaataaagtgaaaaccactcactgtctgagggcatcttcctttgagttccttcagaaggaaagcaactaatgtgagggcattgtatgcccgatcagtgactccttctacccttcaagagtcttggctggatgcagccgctcatgcctgtaatcccaggactttgggaggccgaggcaggaggatcacttgaggtcaggagttcaagaccagcctgaccaacatggcaaaaccccatttctactaaaaatacaaaagttagccagatgtggtagcaagtgcctatagtcccaactactcaggaggctgagacaggagaatcactggaacccaggaagcagaagttgctatgaaccgagatcgcaccactgcactacagtttggacaacagagcgaaactccatctcaaaacaaaaaaaaaagagtttcaaactactaccttcaaactttccacccagaccctctcacacttggcttagcaaataacacaacctttatagagaacaatttgccactttccatcaaaattacaagtgtgcaaaccatctgacaaagcatttccactcataattatcctgcagataaatctatacacatacaaaatgacctatgtataaagacattcagtctaggcacagtggctcatgcctgtaatcccagcactttgggacgctgaggctggtggatcacttcaggccaggagttcgagaccagcctggccaacacagtgaaacctcatctctactaaaaatacaaaaaattagctggatgtggtggcacacacctgtattctaagatacccgggagactgaggcatgagaatctcttgagctcaggaggagaaggttgcagtgagccaagatcacgccactgcactctagcctgggcaacagagtgagactgtctcaaaaaataaaaataaaagatattcaatgcaacagtgtttctaatagcaaaggaaagggaaagatctaaatgttatcaataaaggactagttaagtaagttctggtgcatccatacaatgaaacaagatacaactgttagaaaccaaggctggtggccgggtgcagtggctcatgcctataatcccagcattttgggaagctgagacagaaacatcacttgagccaggaattcgagaccagcctgggcaacatagtgagacctcatctctataaaaataacaaaaaatagccgagcacagtgatgcacacctgtagtcccagctactcaggaggttgagatgaaaggattgcttgagcccaggagatcaatgctgcagtaagccataatcgcaccactgcactccagcctgggtgacagagtaagaccctatctcaaaaaaataaaaataaaaataaatgaggctgaacctatacatgacaaaggcaaggaagcaatatgctccatgctacctacattatactactgttgaatctgtggggaaagagggtgggaatattgaggtacctatttgcaggtacatacaatatctctagaatgcataagaaacaatagttgcctcccaggaagacttaggtgactaaggtataggagatgaagccatactatttactttttttttttttaattttctgactaaggaagaattctaggatcaccatatatttttactggaccccacatctatggcctactacactccagccatgccacacttctttgtattaatcttcactagcttataggattttacacatgctgttctctggctggtatttatcttctctctagtggcctatggtactttcagctttcttcctctgggaagcctgctctggccatcacccccgaagtctaggtggggtcctcctctgggttcccaaagctctattctatctctccatcacaagactcatcacactttgctgttaattattactgacacttctgccagccctagtaaactggcaggttcctgcaagcagggaacaagtatcattcatttctacaccttcaccatctcccattgtggtagctgcctcacggcaggtgctaaacatcagtggttcccaacctttttggtactaggaattggtttcatggaagacaatttttccacagacatggaagcaggggtgtgttgaaactgttccacctcaggcatttagattcttacaaggagcatgcaatcttgagccagtgcggtggctgacatctataatcccagcactttgggaggccgaggcaggcggattgtttgagctcaggagttcgagaccagcctgggcaacatggcaagaccatgtttatttgttgtctctacaacaaattaaaaaataaaaaattagccagccattgtggtatgtgcctgtaatcccagcaacttgggaagctgaggtaggaggatcacttgagccagggaggcagagattgcagtgagctgagattgcgccaccacactccagcctgggcaacagagagagagagaacttgtctcaaaaaaaaggaaatggaatgcacaaactagatgccttgcatatacgcagttcacaatagggtttgtgttcctgagaaactaattccgtggccaatctgacgggaggcagagctcaggcagtaatgccagctttgctgctcacctcctgctgtgcaacccggttcctcacaggccacagacaggtaccattctaccacctagggttaggggaaccctgctatacacgtgtaaagagcagatgtggcccattacctttccaatgagatgacctgccacatctgctactagcacttaggagcaatgccaacccagtttcaagagtcagagaagaacagccttaaagtgtgaactttaaaatcgcccctttctactccataattgctgtgtgacctttggcaagacaaatttctgtctctgagccgccaattccacatgtgtaaaataaggataaaagcagcacctaccaccccataagtgttattaagaataagatattaaaaacccaacttgagatacagtaagcgttcactaactgcacatttacagcccacaccccctttcacagagagtattagagcatcctggttaagagtatgaactccactaaaaatacaaaacttagccgggtgtggtggtatgcgcctgtaatcctagctacccaggaggctgaggcaggagaatcgctggaactcgcggggcaggggctacagtgagccgagatcgcgtcactgcactccagcctgggcgacagagcaagactcccgtctcaagaaaaaaaaagtatggaccctggagtcagaatctgaccccactgctgccaagccagctaaaccttaggcacctgtcttaaactctgggagcctctagatggggataatagcacctatctccataagcctaccgtaggatcaaatgcaataatacaagcaaaatgctttgcataacgcaatgtagaagcctctctggaggctcgaaattaattctgacagtcggcaatgaggctggaacaacagcgtacaacatcccaaacattttattggctggttacaatgcgttaggcatggtgcaaagcattttccgcgaattattacctataaccctcatagcaaccctgtgaggcaggctgtactgtcaaccccacttcacgggtggcgaagcgaagccttgaaagaagtggaggtgacctgtccaaggtcacacggggttaggcggcggggttagggtacgaacccctacagcctgacgccaggccccacgccataaccaccgtgccatcctccctcttgaacaccgtgcgcttcccgggatccgcggcccctcctgccccaggcgccagtcaaaagcgggtgcgcagcccaccccggcggccgcgctgctcacctcccgcagcagcaacagtgcccggggtcccgcagcgtaagttctgccggcaagtcggatcccctcacaggtccgccgctgcgttcatacacaagcgacttccgttccgccgctacttcaggccgggtcatgctaacggaagtgcttcctttttacagtccgggtggacccaaagctccgtggcggtgctgaactttagggcagccactagccacggacttaagcggcaattgagctcctcaaagtgggtgagtgcaaatcaaatgtgcgctaaatgtcagatacactggatgtggaagaagaaatgtcaaatagtgtcaaatagttcatatatataatgtttatattgattatgtgctgcaataattgttgggatatattggattaaataagtacatttgttgaattagttttttttatttgtagctatggtggtagaaatatttgaattaagttcacctgttgtttctttttactttttcaatgtggctagcagggggaaaaataatatggtgtgatcatggctcactgcagcttccgcctcccatgctaaagcaatcctcccacctcacactcccaagtggctgggactacaggcaggcgccaccacgcccagctaaaatttttttaatttttttgtagagaccggtctccccatgttgcccaggctggtctcaaactcctacctaggcgcaagccatcctcccaccttggcctcccaaagtgctgggattgtaggcatgagccaccgtgtccggtccttactgggaaattttaagtcacctaagaggttcacgctctatttctattggagggtgctgccctgtaggttaatgacttcctgattcacatctccagctggaccctccctgcagtaccagagccatagctcagctgcctacttgacaccccttcttgagtgtctgatgaccatctctaacttatacagaactcttcatttccacacatgcaccttcaccaaaaacctgtacctgtcattctggcccatctcagtaaatggcccaaccatccttccaggtgcactaggaggaactgaatggtcattttcttcacctccctggatccccacattctatctgtcagtaagccctgtcaactctaactccaaaatgtcaaatctgtctactcggtagctacaactacccaggccaccattgtctcatcagaaacaatcacagtagcctgctaatggtcaccttgtctcctgagaacagtttcccacacatagcctaagggaatttgtgtttgttttattaaatcaaattatatcacccctctcctgaaaactctccgtggcaggccgggcgtggtggctcacatctgtaatcccagcactttgggaggccaagatgggcagattgcttgagcccaggagttctagactagcctgagcaacatgataaaaccccatctctacaaaaaacacaaaaattaccccggcatggtggtgggtacctgtggtcccagctactcagaaggctgaggcagggaggattgcttgagccagggaagttgaggcggcagtgaaccatgacctcaacactgcactccagcctgggtaccagaatgagaccatgtcttgaaaaagaaaaaaacaaaaacagccgggcacggtggcttatgcctgtaatcccagcactttgggaggctgaggtgggtggatcatgaggtcaggaattcgagaccagcctggccaatatggtaaaaccccgtctctactaaaaataaaaaataaaaaatagctgggcatggtgccgcgtgcctgtagtcccagctactcgggaggctgaggcaggacaattgcttgaacccaggaagcggagattgcagtgagccaagatcgagccactgcactccagcctgggcgacagagcaagactccatctcaaaaaaaaaaaaaaaaagaaaagaaaagaaaaaaacaaaaacaaaaagcttaagagctttccattgcccgtgcaataaaatccagatttcctactgtatcctaggggcctgcatgatgtggcccctgctttttttttttgagacgacgtctcactcactctgtcgcccaggctggagtgcagtagtgcaatctcggctcactgcaacatccgcctcccaggttaaagcgactctcctgcctcagcctcccgagtagctgggattacaggcgtgcaccaccacgtcaaactaatttttgtatttttagtagagcagggtttcaccatgttggccagattggtctcaaactcctggcctcaagtgatccgcccacctcgacctcctaaagtgctaggattagaggcgagcaccaccacgcccggctgatttttgtttttactagagatgggttttcgccatgttggccaggctggtctcaaactcctggcctcaagtgatcctcccacctcagcctgccaaagtgctggaattacaagcatgagccaccatgtctggccccctgcttacttttacttctccaacccatgtacttcttaccacttacttctcctactgtgttctttctagttgactatacttcaactacataattttatcttgctccttcaataacccaagcaaatgtttatttcagaccctctgtccttttttttttttcttttcttttttgagacggagtcttgctctgttacccaggctggagtgcaatggcgtgatgttggctcactacaacctccacctctcgggttcaagcaattatcctgccacagcctcccaagtagctaggattacaggcacgcaacaccatgcccacagagcttctcttcttactattatctttctggaatgctcttctccaaaattgtttcgtggctggccccttctcatcctttaggtctcagcataaatatcagctcttcagagagaccctctctgaccacttcatataaactactctatcacttctcttattattttcttcaccatatttgtcactattcaaaatgttggcattacttattttcttatcattgcctattccctggactatcagctagggagggacacgtcgtgtcttgttcatggctttatccccatgatctacacagggtctgactcatagaagggcttaatgaaaatttgttgaatgaataaatgactgctttctgtcttagtttgggctccccagaagcagacctgagacaagtatttttttttttttagaccaagtctcactctgttacacaggctggagtgtagtggcccaatcttggctcactgcaacctccaccacccgggttcaagcgattctcctgcctcagcctcctgagtaactgggattacaggcaagcgccaccacacccggctaatttttgtatttttagtagaaacagggtttcaccatattggccagactggtctctaactccccacctgcggtgatccacccaccttggcctcccaaagtgctgggattacaggcatgagctactgtgcccggctactgagacaagtatttgagtgcaggtagttgatttgcaaagtaatctcaggaaacactggtagggtagtaggggagtgaaacagggaggggagacagccaataaacattgttaacaagcaactttcttgcaggcatctaggtcttaatcctgctggagaacactgggaaataatgcagaacactgtgctggttaattatttgtgtcaacttgactgggccacaggttgcccagatatctagttaaacgttatttctgggtgtttcttgaggaagagattagctttggtggactgagtagagtagactaccctccacaatctggatggacatcatctaaccccttggggacccaaataggacaggaagacagagcaaggttgaattctctgtctgcctgactgcttaagctgagacattggtcttctcctgcccttggactgggacttaaacaccattggcactcctgattctcagtcttttagattcaaactggaatttacaccaccacctttcctcggtgtgcagcttgcagatggcaaattgtaggacttctcagcctctataatcacttgatccaattccttatgataaatctcattctagatgtagaaatatacatatagtggccaggcacagtggctcatatctgtaatcccagcactttgggaggccaaggtgggaagatcactggaggtcaggagttcgagaccagcctggccaacatggtgaaaccacatctctaataaaaatgcaaaaattatggccaggcgcagtggctcacacctgtaatcccagcactttaggaagccgaggcaggcggatcacctgaggtcaggagttcaagaccagcctggccaacatggtgaaacccccgtctctactaaaaatacaaaaaaattagccgggcatggtggcgagcgcctgtaatcccagctgctcaggaggctgaggcaagagaattgcttgaggccaagacaggaggattgcttgagttcaggagtgtgagaccagcctgagtaacatggcaagaccccatctctacaacaaattaaaaaataaaaaattagccagccatggtggcacagtcctatagtcttagcaacttgggaggctgaggtaggaggatcacttgagcctgggaggccgagactgcagtaagctgggatcccgcaactgcactccagcctgggcaacaaagcgagaccccacctccaaaacaaaaaatagggcggagggtggtgttccaagtgaaggcaccagactgctgatggccagaaggaaaaggagtgagtctttggtggtttgggatgttgctgaaaatttagtggataagctgagaaaatttcattttcacaaagaaacaatgctaccattgtaagtaagctaaaagtgattgcctcaaagttaagttacctggtctctcttttttttttttttgagacagagtcacgctctggggcccaggccggagtgcagtagcgcaatctctgctcgctgcaaactccacctccagggttcaaatgattctcctgtctcagcctcccgagtagctgagattacaagtgcacaccaccatatctggctaatttgttgttgttgttgtttgttttgtttgtttttttgagaccgagtctcactctgttacccaggctggagtgcagtggccgcgatctcagctcaccgcaaccttcacctcccaggttcaagcaattctcctgcctcagcctcctgagtagctgggattacaggcaggtgccaccatgcccggctaatttttgtatttttagtagcaacagggtttcaccatgttggccaggctggtcttgaactcctgacctcaggtgatccgcccacctcagcctcccagagtgctgggattacaggcatgagccatcacaccaggcacatcatctttgttttatcttgtcgctacattaaagaaactgaacctttcaaaagtttaaaaaaaaaaaagttctgggcttggcacggtgtcctagcactttgggaagctgatgcaggaggatcacttgaggtcaggagtttaaaaccagcctggccaacatggtgaaaccctatctctactaaaaatacaaaacattagtggggcatggtggtgggcgcctgtaatcccagctactcaggaggctgaggcaggagaatcgcttgaaccgggaggtggatgttgcagtgagatgagaccctgcctgggtgacagagcaagactccgtctcaaaaaaaaaaaagttctccatcattgccattgtcattgtgattttaggtagggagtcataaccactgcccactcacatccagccagcacatcgcagtttccgaagtaccaaacacattccactccacctcccttctgcaggaaagggtcctgaagctctctaagatggctttgacatgggtccacaaattctttgacattcctttcttcaagaggtggagcctaattcccctccctttgagtgtggactgaacttagtgactcatttctaatgaatagaacaaagcagaagcaacagtgtaaggcttccaagaccgggtcataagaggcactgtttgtggcttcctccttgccctctcttctgtctcactgtggggaaagccaactgccatatcatgagaaaactcaagcagcagctctagggttagccctacatggtgaggaactgagacctcctacccacagccatgtgcatgagcagtattggaatggatcctccagccccagtcaagccttcagatgactgcagccctagccgacaacttgactgcaacctcatgagcgaccctgagacaagaacagcccagcttagcccctctcaaatttctgacccacagaacctaagagataatgaatatttgtcattttaagctgcaaattttggataatttgtcacacaacaatagataaccaatacactgtctttggcccatgtagtaaaggtctgttcttctccagggaaaggtgccctagtccttggtctggtccatcttgggactgcaggggccaccccaggacccaaaggccaaggcacagaccacatacactgggccgggctgcctgtgtgctcacaggctgtttatttatccaagagtaaggaggagagagacaggatgaagagaaaaaccagactccccacggtggcagggctgaggggaaaaacaaacagaaaatctcctcttctttctcttgctgctgaccccagggtactccagcttcagatgggacctctgggggtggcttaggggcctcgaggaggcccggcagctcagctgttggctggggtcaggatccgcacaggggcaggtcccagactcggaatggcttctgtgtacacaaaatatctctctgcaaaaggcactggtggaggggggcagcaggaaggccaccccatcacaggcagagtccactctgtcctgcgtctgggtcctgggccccaagaccaatccagtctccctcagggttggggtttcggaggcccttgttcctctcctctcccttccctcagcccaggggtgagcaggcagtcggtggaggcccagctcaggccatgtcatggacacccctcttcagggctagtgcatccggcgacttctaggccaacagcccgaggcgggtgactttggccgacaggaaggagtggatgatgaagactatggttttgggacacgagtgcaggtccagctgctggagggtggatggagagaagagtcagggccctggccagcctggcctccgagagtgcacaccccctcctccccagggtgcagaggcagcccctcactcacgatctcgccttcagcacctccaaaatccaggaaaaggagactggcaccgtcatctgaagacatctgcagcttctcgaagggctgtcgcaggagcacagctcgggctgcacctggctcagccgcccacagtgtgaagcccttgtcgatgtgcacagacaggctgcagggacgcccattccacgtgcaggctgcagggagggcacataggtacaggcacagctggcacctcagagactacaccccaacctccaacccccaccgcagcttacaaagtggggcctgaatgcctccagggatgggaggctcactgtttgtcgtggcaccagtacacccaccctgcagagagtcatcacccccaccctcagaggacctacacccacttccagtcccacttccagcagcacaagtagaaagggggagcttaaaatgtgccatggacaggaggctcactgctgataaaggcatcatcagatctaccaagcaccgcccttggagacctgcagagttacccggctaaatttaaatttcagataaacaatgactaatttgggcatacttctgtgaaaaaagtattcattgttaacctgaaattcaaatgaggctgggtgtcctgtatttatttcctctggcaaccctaccccaagtgccatctctcacatcctcaccagcagattgacaaaactggggcaagaaaaccccagggagaagagtctctgcctgctagggcacctgcacatccaaaacagagggcccaaacccaacttccttttttttttggagaaacagtctcactctgttacccaggctggagtgcagtgggcgcaatctcggctcaccacaacctccatctcccgggttcaagtgattctcgtgcctcagcttcctgcgtagctgggactacaggcacctagtaccatgcccggctaatttttgtattattattttttttttttgagacagtcttgctctgtcgcccaggctggagtgcagtggcacaatctgggcccactacaacctccacctcccagattcaaacaattctgcctcagcctcccgagtagctaggactacaggcgcccaccaccatgcccggctaatttttgtatttttagtagagacagggtttcaccattttggccaggctggtctcaaactgctgacctcaagtgatccacccgcctcagcctcccaaagtgctgcgattacaggcgtgagccaccgcacctggccaatttttgtattattagtagagacagggttttgccatgtttgccagactggtctcaaacttctgacctcaggtgatccacccaccttgacctccaaaccccattttctatcccctcctgaagtgccctaaagaaggaagcttgaatgcccctggggataagaggcttattaccagagggacactcccagatcctcccagcacacctgtagacacctcctgcacaccctcggcggcccggtgacagccatccacaagctggcgggtccaggcagccagctcctgcggtgactccacgctgaacaggtgagtgtccacaccgtgacgcgtgcccgtgcgcagggcaaaagagagctctgcatcgtagggcactgagcccttggaggggcctgagtgcaccagtctgggggttgggggcagagggctgagcatgaggcctcaggccggaggcaaatagttctgggcaaaggggccagtgacctgggaagaaaccctgtaaatcctttaccacctaacaggacaggacttgccagggggcactgattgactcagcaggagacatctcctgccaccctccccgtcactcccttggctctggctatactggtgtcatcacacacacctagcacatgcctgcctcagcacctttgcatatgctcttccctctgcctatacatgcttccctgattatctgcacggctcactccctcacttccttcagatgttagtttaaatgtcacctcctctgagaagccttccctgacctcccagtccaaaatagcacccttgtcactcactagccttactttttaatcatggtaccagaaattatactttttattatttgttttcgttggtttttgactgtctttttcactagaatgtcaactaggttagaaattttgatcttgtgttcaccactgtattcccagtaactaaaaccatgcctgcccacagtaggtgctcagtaaacttttgttgcctaacttgaatcacttgattaggcagacagtccaggacctagttatccctagtagccagcaggctcctgacacacgggccagagccagcctgaggtaaggagacatgggggacaaggacttcagacccctgcagcttgactctcacttgctgtgtggccttggtaagccaactgcccctctctggggcagaaagttctgccccatatccctctttgttcctccctccacccactctttctcctatagctcagttccccccgccacagactgctgctgacacccgccttcgactttccagccctgagctgcagaccctcgagtccccaggcttcctatccaagctccctctccatcccacacacactctggacttaactcagcatcttgctccagcctcctccctttccacccccacccccagtcccacgctcacccagacacaagctccaaacctcctgttcattccggacccctccttcacccgccccatctggcaagcacggagccctgttaattttacacccatgtggtttccaatgccaatgctgcctttcttccccatctgctcctgccacccacctccacctcccccagccaccatcatctctcctgcatgactgcagcacctccccacttccatcctgcactctccgctgcattctccacgtggcagccacagggattctcttaaagcaaccagagcacctcgctccccagcttaaacccttcaacactaccaaactcttaagctaaagctaacattccttaatcaggcaatagaagctcttcaagatcaggccctgccaactcccttctctccatttcctgcatgaattctggttatcacaaactcatagctccatgaacatgctatagcccttcatgcctctgtacttttgaccatgatgttctctctgcatgggatgctctttcaccctttcttaaacagaaaacttctactcatccatcaaagtccagctcaaatgtcacctcctccctgaagccttcctctactaccccaacagagttaagtggctcctacaaaccctgcactgtaatggctgttcctgggtctgtctccccagccagacaaggttctctctggaggcagaaactgttggggtcagctctgtgccctctgaaccatgcagcacaaggcataagtgtcagcgaatgagtggctaatggggaccttatatccttttgttccaagcacccattttacagatgaggaaactgaggcccagacagggcagagacttgcttcaggtcacctggggaatagctgagggtggacagggctggagttcccagcttctggggccctgctggagcatctcctggcaagttctgggggagacatactgcccctgcctgtgggtacctggtggcgatgagtggggcagtacgggctggccggctcagggcctcgcgggtctcggggagagacaagtagaggagcagttccttttcagttagcagggccagggtgggggctgtgcccccactgggcagctgcagagaacaaaacagcagtgaggatgggtgggggaagagagggcagagggccagggcagggtgaggtggccaggggcactgggaacagggccagctccaaaggagcggaagagagagagggataggtcccaggcccagcaggtacctgctcagttagccagccaatctgcttgatgtcctggctcccagctgtgctggtggctgccaacagtgcctgcagctcatccttgacccgcggcgtcagagtattgacctgggcttggatggcagtcgcccacgacctcgcactagcctcatccttggccctcaggaagagggtgtcttgaccatctgccgagcagatctccagatacctgcaggcacaaatgggtggagacaaggacctgaccattaggctgcagctgcccaaccctggcccaagaaaccccacccaccaccaaaccaggagaaaccagggggatgtccgtgagagaatcaggagcaaccctcactgctgggctccagccacagttgctggggcttcatggggcataggaacaagcgagtgtgacatatacacacgtgttcatatattttgtggggtttttgttgttgtttttgaaacagagcctcgctctgtcacccaggctgcactgcaatggcccaacctctgcctcccaggttcaagtgattctcctgcctcagcctcccaagtagctgggattacaggcacacgccaccacacccatataatttttgtatttttaatagagatggggtttcaccatgttggccaggatggtctcgatctcctgaccccgtgatccgcctgcctcagcctcccaaagtgctgggattacaggcatgagccaccatgcctggccttatttttttatttttagtagagatggggtttcaccaagttggccaggctggtctcgaactcctgacctcaaatgatcaccccgccttcgccctccaaagtgctgggattacaggcatgagccaccgtgcccagcctacacgtatgcagatacacacaaatatacacacacactgaaacatgcatgatggtgtaatagggcctaaattattgctgtgtggctattcctaatcttgcccctttctcctggtttctaaggaacatcctcttctgggccagctcccaggttctccttgttgcacagaaccaaactaattcactaataagagcaggggaaaaaaaaaaaaaaaactaagctggacatggtggctcacgcctgtaatcccagaacttcgggagactgagccaggacgatggcttgagcccaggagttcgagaccagcctggacaacaaagtgagacactcatctctaaaaaagaaaaaaaaattttttttttaattagccaggcatggtgacacgtgcctatagtcccagctacttagaggctgaggcaggagaaccacttgagcccaggagtttgaggctgcagtaagctataagggtgccagtgcactccagcctagatgacagcacaagacctcatcttaaaaaaacagaaaaacagacagggtgtgatggctcacgcctgtaatcccagcactttgggaagccaaagcgggtggatcacctgaggtagggagttcaagaccagcctgatcaacatggagaaaccccatctctactaaaaatacaaaattagctgggtgtggtggcacatgcctgtaatcccagctactagggaggctgaggcaggagaatcgcttgaacccagaaagtggaggttgtagtgagctgagatcgtgccattgcactccagcctgggcaacaaaagcgaaactccgtctcaaaaaccaaaaaaaaaaaaaaaaaaaaaaaaaaacagaaaaacaaaacaacaacaaaactaaagaggcttgaggccaggcatggtggctcacacctgtaatcccagcactttgggaagctgagccgggcagatcacttgaggccaggagttcaaaaccaacctagccaacagggcaaaaccccatctcctctaaaaacacaaaaaattagccagacgtcatggcgggcacctgtggtcccagctacttgggaggctgaggcaccagaatcacttgaacctgggaagcagaggttgcagtgagctgagatcacaccactgcactccagcctgggtgacagagcgagatcccccatctcaaaaagaaataataaattattgttttctaaaccactaaattttagggttggtttgtgatacagcaacagatagccaaaatactagcagaaaagactctttggcttttgtcttatttctgcctggaatatgaacacaattcttgggatgcagccaccatcctgcctccacgaagaagaaaaccgcccataattaaaatggtagagcaggaagctagaagcctagttccttgatggcatccttgagcatctacagcagcctgaatagctgacccctggacttctttttaaacatgtgggaaaattaaccccttttatttaagtcattgcttgttggagtttctgtacttgcagcccagtgcaatcctaacactgagtaaaagtttgaagcagttttcattatattttggttgccaggctgtatccctatgactgggatactgcactgacagtgggccatatggaaccccagttatattgaggttacctatgtaggtactcaggcatgtacatgttaaaacacacatgcacacacatatgtgcatacacatacaaataacatataaacaaacacacatgtacaaatctatactcatacatgcaaatgctctcatatatacatacaagcacttgcatttacatgtcatctacacgtgcgcacacttagaaacatatacacacgtttcaggtaatgtctgggatcaggctgggaatctaaggttctatgagtctctagaaggactaatactacttcaccttcacactcacagaaggcccttccgggccgggcatggtggctcacccctgtaatcccagcactttgggagcccaaggtgggtggatcttgaggtcaggagtttgagatcagcctggccaatgtggtgaaaccctgtctctagtaaaaatacagccgggcgcggtggctcatgcctgtaatcctagcactttgggaggccgaggcaggcagaatgcctgagctcaagagttcaagaccagcctgggcaacatggtgaacccccgtctctgctaaaatacaaaaaaaaaaaaaattagtcaggcatggcggcgtgcacctgtagtcccagctactcaggaggctgaggcaggagaattgcctgaacctaggaggcggaggttgcagtgagctgagattgtaccactgcactccatccagcctggcaacagagaagactctgtcccaaaaaaaaaaaaaatacaaaaattagtctattaaaaatacaggcgatggctcatgcctgtaatcctagcacttcaggaggccaaggtgggcggatcacctgaggtcaggagttccaaaccagcctgaccaacatggtgaaaccccatctctaataaaaatacaaaattagctgggcatgttggcaggtgcctgtaatcccagctactcagaagtctgaggcaggagaatcgcttgaacccgggagaaggggaccgcagtgagccaagattacaccactgcactccagcctgggcaacagagcgatactccgtctcaaaaacaaaaacaaaggctcttttttagagcatcggcaagtgacctgtgaatcaccagtttttgcctcatgggggcaggcaagaggtgtggcatcgagtgagaccaagagatttggatgctggacgttaaccagccctcccagccaatgttgggcatttgcttggcattgaacctaggctgtcactaggacccacagcccaagcttgtaatgcatatagcagttaagcatcacctccaacaatgcatatcccacttgaccaaatatgctccatttagccaccaccatcactcaggtatcttgcaccttccaaagcagaaaggactaccaggattgaggcaagtgccaccctttctggttgtgtgatctcaagtaggttacttcccctctctgtcctcatctataaaatggaggtgagccgggaacgatggctcatgcctgtaatcccagcactttgggaggccgaggcaggcagatcacctgaggtcagcagtgcgaaaccagcgtggccaacatggtggaaccccatctctacaaaaaatacaaaagttaggcagggcacagttgcttacacctataatcccagcactttgggaggctgaggcgggggaatcacctgaggtcaggagttcgtgaccagcctgaccaacatggagaatcccgtctctactaaaaatacaaataattagccaggcatggtggcaggcgcccgtaatcccagctacttgggaggctgagggaggagaattgcttgaacctggaaggcagaggtttcagtgagccaagatcatgccattgcactccaacctgggcaacagagtgagactctgtcaaaaaaaaaaaaaaaaaaaaaaaagttagccaggtgtggtggtgggcgcctgtagtcccagctacttaggaggctaaggcaggagaatcacttgaacccaggaggcagaaattgcagtgagccaagatctttgcaccactgcactccagcctgggcgacagagcaaaactctggctcaaaaataataataaaataaaataaaatggaggtgaaataataggactttgcccattgggcctctgtgagagctaaataatattgcacagggaaagcactcaacacagtgctgggtacacagtaaacactcagtaaatgttaggtggtttcagtattatcaatgaactgttaaaggctgctcagatgtgaaggatgtaaccttccatggccctgataaaaaggttaccagacatctcagagctccagcagagtgggaagagacgagaggatcagtgagtccaacaacctcatctcacaatggagaatctaaaggtcagtgaggaaaagggcctagttcaaagaggaccaggactggaacgcagggttcttcctcagaccaagttcatccccagatgtgagctgcccagaggaagaagtgagaagcaaagcacaccatcatctccatggcttcactcaggcttccagtcaatctattttttaagcacctactatgtcctggcattgtgctggtcattcgtacaacacagaggtgtctttccattggtcccaccacctgacgccagggcatctgtccatctgagttgctcccaaccccagccttacctgggctccgggtcattgggggtgcacctcttcgagacatatgccatcttcaaggacatgtgtttggcctcgctgaagttccggggtgtggggccaggggaggaaggctgccgctgaaggggtgaggcaggaggtgagtcccagccgaccgaggtcccaccagtagagttcttgaaatacggtgagacgtccttcatatacttgactgattgggagagacatcagcagtcaccactgtgacatgggctcccagcacatatcacaattgtcactaatttattaagagtttaatttacgtgtcactattagacccttagtaagcaagagtccagtagtgatattaacaaattcttctaagttaaagtctctgacagggcagtggagcagaaaatactgtatcccttctctctatccctatatagagatagggcccgcctatatcccttctctcattttccccatggttaatagacatacagccacctggaagaaagactctatttcccagcctcctttgcagtgaggtgtggccatgtgacttttttttttttttttttgagacagtttctctctgtcacccagactagagtgccatggtgtgatcacagctcgctacagcctcaatctcccagatcaatcaatcctcccacctcagctccccaagtagctgggtctacaggtacgcactaccacacccagctattaattttttgtagagatggggtcacgccatgttgctggtcttgaactcctagacagtgtatacaagaaggtggttacaagactttcccaggctgggcatgttggctcatgcctgtaatcctagcactttgggaggccaaggcgggcagatcatttgaggtcaaaagtttgaaaccagcctgaccaacatggtgaaaccccgtctctactgaaaatacaaaagctagccgggcgtggtggctcgcacctgtaatcccagctactggggaggctgaggcaggagaatcacttgaacccgggaggaggaggttgcagtgagccaagattgtgccactgtactccagcctgggtgacataacaagactctgtctcaaaaaaaaaaaaaaaaaaaaaaaaaaaaaagactcccaggctgggcatggtggctcatgcctgtaattccagcactttgggaggccaaggcagtgtggatcacttgatgtcaggagttcaagaccaccctggccaacaaggtgaaaccctgtctctactaataatacaaaggttagctgggcagggtggtgcatgcctgtaatcccagctactcgagaggctgaggcatgagaatcacttgaacatgggaagcaaaggttgcaatgagccaagattgcgcactccagcctggacgatgaagtgcgactgcctcaaaaaaaaaaaaatgatgactttcccaagaccttgtctctcttctcccaacaaggatataccctctgtgggtgcctgatgcctgctagcccgtgggcagcctctcttcctctgctctcaaccacacctgctcccagggccatctggcttgctagctatctgacgtctgcagtcaaagcccagccaacgtgccctgtgagtggacagcccaggaaggagttaggaagtaattcttggcccacctccctggaagaaccagataagaagctatttctgtcgcaggagatgcctctgaggctcagataggattcaaagcaaatggaggcaaataagagggagttacaaaccctattggggttgggatagaagcaatgttgaaagaaaccagggtcaggtttttttgggagaagcaagcctgggtctgacttttggggactaggactcaaatgacttatcatcactgtagcaacgacttaccccaggactgactattggattatgtctcaaagggcagcagaagtgggacatatcacagcctacttgacagccaaaaaccatctcccctctttttcctttgctaagagaaccctgagccctagaggctcagcttctccccagcttagagggagaatcttgattggtcaaatcaaatcatgatcattccatcctttttgcttgtgattggtttagaaaggggcaaatgatacagttctggccaatgagatgtgaggaaaaaaacactgccttccttttctcctcctttagcctttcaaagttgctgggagggagcttgttcctagtgcaacgacagccactttttttttctttcttttttttgtgacagagtctcactctgtcgcccaggctggagtgcaatggtgcagtattggctcactgcaacctctgcctcccgggttcaagcgaatctcctgcctcagcctcccaagtagctgggattacaggtgcgtaccaccacacccagctaatttttgtatttttagtagagatggggtttcgccatgttggccaggctgatcttgaattcctgacctcaggtgctccgccggcctcagcctccaaaagtgctgggattacaggcatgaaccactgtgcccagcctactttttgaccacaaagtttgggatccacacattgaggatggtgaagcagaaagatggagagacctgagttttcgatgataccatgagcccctaaattaatcttccctggagccatgctgtctcaagatgttcgggaggataacacattttctttgatgtttaaacctcattgaattggattcctgttacttgcagtcaaaagcatcctgacaaatacagcccccaatggtgcaactgctacatctccttgctacaagtggccacgtcctgctcaaagccctgctctgcctcccctgcaccctttgcctaacttcaatgccctctaggacatgggccctgcccacaggtcctgtcttcctccctggcttcacttcttgccatatccctaatctcaccctctggtccaatcacactaactactcagaggctgtatgagcttccaaacttccacactattgaaaatgcagttcccggccttgtgcggtggctcatgtctgtaatcccagcactttggtaggccacagtgggtggatcgcttgagctcaggagtttgagacgagcctggccaacatggtgaaaccctgtctttactaaaaatacagaaaaaaattagctgggcgtggtcgtgggcacctgtaatcccagctacttgggaggctgaggcaggagaattgcttgaacccgggaggcggaggttccagtgagccaagattgcgccactgcactccagcctgagggacagagcaagaccccgtctcaaaaaaaaaaaagaaaaagaaagtaaaatttaaaaaaaaattagccaggtgtggtgacacatgcctgtgattccagctaatcaagaggctgaggcaggaggatcgcttgaacccagcaagcagaggctgcagcaagccatgattacgccattgcactccagtctggtaacagagtgataccctgtctcaaaaaaaaaaaaaagagaaagaaagaaaatgcaattccctctggagtcagatgctcttggatttgaattccagctccagcactgtctaactgtgtaaccatggacaaggtcatttacctctctgggcctcaatctgctagtcagtaaaagatgaatagggctgggcacagtggctcacgcctgtaatcccagcactttgggaggctgaggcgggaggatcacctgaggctgggagttcaagaccacctggccaacatggcgaaaccctgtctctactaaaaatacaaaaattagccaggccatggtagtgcacacctgtaatcccagctactcaggaggctgaggcaggagaattgcttgaacacaggaggcaaaggctgcagtgagccaagattgtgccattgcactccagcctgggcaacaagagtgaaactccgtctcaaaaaaataataataaaaataaaaaataataaaataataaaaataaaagattaataactacagccagacatggtggctcacgcctgtaatcccagcactttgggagcccgaggcaggcagactgcttgagcccaggagttcaagaccaggttgggcaacatagcaaaaccttgtctctaccaaaaacacaaaacattagccaggcatggtagtgtgcgcctgtagtcccagctactcgggaggctgaggtgggaggattgcttgagcccaggaggcagaggttgcagtaagccaagattatgccactgcactccagcctgggcgacagagcaagaccctgtctccaaaaaaaaaaaaaaaaaaaaaaaagtctgcctcagagagatgtcaggattaaataaaatgttgtaaggcatgtggtgagtattaaggactcaagaagcaggtgtttctcacttatcagcctttcttgcccatacttcctaggtctccgattctgtgtgttagggttgtctcctccacaaaactgggaactcctaaaagaaattgccgggcacagtgcctcacgcctgtaatcccagcacttgggaggccgaggcgggtggatcacgaggtcaggagatcgagaccatcttggccaacgtggtgaaacctcgtctctactaaaattacaaaaattagccgggcatggtggcgtgcacctatagtcccagctactcaggaggctgaggcaggagaatcgcttgaacccaggaggtggaagttgcagtgagctgagatcgtgccattgcactccagcctgggcgacagagcaagactctgtctcaaaaaaaaaaaaagaaaagaaaaagaaagaaactgggcttgctcttcaaacccagagttggctgggcagtagctcacgcctgtagtcccagcacttggggaggctgaggcaggcagatcgcttgagcctaggagtttgagagcagcctgggcaacatggcaaaaccctgtctctaccaaaaatacaaaaaactagctgggcatggtggtgtgcatctgtagtcctaggtacttgggagggtgagatgggaggctaaggtgggaggcttgcttgagcccagaaggttgaggctatagtcagcctggataacagagcaagacccatttcaaacaaaccaaccaacccagaatcagtgttctgtgaatggaaaaatgaatgccagggcaggacaggctcatttagcaggagggaagaggtgccatagcccaggagacaggcccagctcagaggtcacctcagaagaggtgatcagatgctcagtctggatccatcacacccatcacctccgcagtcccctacgcctcactcccctgtgattgtctgtgtagggtctgtgtccccaactaggctgagagcactttgagggcagggacctggtctgactcttctctgtgtccccagaatccagcagagatctcatacgctacatgctcagcaaatgaacatttgtcaactttgaagccagagaaactgccagatcccctgctcgcccagccatcccagatctgggtccccctcctttcccacaggaacatgctataaatggacagcataccagctgatgccagaatcagggcttgcatttcacaaaccaagtggcctgtcccagagtgggggtggggtcctgggggccccggagtgtggccataaatagcccaactctgaggcctcctcccctctctgatttctgcctgagtcacccgacaaggcagggtggggctgccaaagcctatggcctagagagctgagggcacgaccacagccctgtggccagcattctcgagactccaaagataggcccggccagtgcccccaccctccccagccaagcccctggcctgggagcctgataagcagtgacacatgggcccttcctcctcagggaagctgaggcacctataaacagaggccccaatttccagggagctccagctctgccaaggagggaagccaggatctggctctggccccaaagagccaggaatagattccactggaaacacatggaagagaaacagggcaggatcactcatcaggcccagtataagtggactgggggtcacatatgcgttgctgagagaagggaacacatctgtttgggcaacaggatctccagtacttatcccagtgcttaataaatgtctgtgactgaatgtcctggctgaagggaagcctgtcctctaagctcaagctgttccttgtctgttcagtgggtggtcatttacttaccgctgcttgaaattagatgatagagccatttgtttactagcccatggcctttctcccctaaccagaatgtcagttcccggagagcaggggctgccctgttttccagttcactagggtatcctcaccatcaagaatagtacctgacggccgggcgcggtggctcacacctgtattcccaacactttgggaggccgaggcgagtggatcacctgaggtcgggagttggagaccagcctgaccaacatggtgaaaccctgtctctactaaaaatacaaaattagctggatgtggttgcgcatgcctgtaatcccaactacttgggaggctgaggcaggagagtggcttgaacgtgggaggcagaggttgcagtgagccaagattgtaccattgcactccagcctgggcaacaagagtgaaacgccatctcaaaaaaaaaaaaagaaagaaagaaaaaaaaagaaaatagtacttgacatataccaagtaagcagtaaaagaaatctgggccaggcacagtggctcacacctgtaatcccaggactttggaagccttaggtgggaggattgcttgagcccaggagtttgaaaccagcctgggtgacatagggagaccctgtcttgaaaaaattaaaaaaaaaaaaattttgagacagggactcactctcacccaggctggagtgcggtggtatgatcacagctcactgcagtcttgacctcctaggcttaagcgatcctcccacctcagccttccgagtagctgggatcagaggctcatgttattatgcctggctaatttttttattttttgtagagatggggttttgtcttgttgcccaggttagtctcaaattcctgggctcaagcaacccacccatctcaacctccaatgtgctgggattacaggtttgagccaccgtgcctggcctacaaaaaatttttaaaaactaggccgggcacagtggctcgtgcctgtaatcccagcactttggggggccgacgcgggcagatcacaaggtcaagagattaagaccatcctgactaacacggtgaaaccccgtctctactaaaactacaacaaattagccagaagtggtggcacacgcctgtagtcccagccactcgggaggctgaggcaggagaatcgcttgaacccaggaagcagaggttgcagtgagccgagatcacgccactgcactccaccctaggtgacagagcgagactccatctcaaaaaaaaaaaattagccgggcatggtagagcacacctgtagccccagctactcaggaggctgagatgggaggatcacttgagccagggaggtcaaggctgctatgatcatgcaactacactccggcctgggtgacagaacaagaccctgtatctataaataagtacgtaagtaaataaaagaaaaaaatgtgttagatgaataaacactgaaagccctggggcttctcagtgtggagcaaaaacattgaaagtgggtctggggccgggcatggtggctcacacctataattccagcactgtgggaggccgaggcagggggaatcttttgagcccaggagttcaagaccagcttgggcaacatagcgaaaccccatctctactaaatatacaaaaaattagccaggtgtggtagtgtgcagctatagtcctacctactagggaggctgagatgggagaattacttgagcctggaaggcagaggttgcagtgagccatgattgtgccacagcactccagcctgggccacacagtgagaacctgtctaaaacaaaaaggaaagaaagaaagtgggccctggagtgaggcaggcttgtaataacgtccttgctctgtgaccttgaacaagtgacttgacctctgcgagcctctgtttccttattttaaaaatggaagggccgggcacactggctcccgcctgtaatcccagtgcttcgcgaggtcgaggcgggcagatcaactgaggtcagaagttcgagaccagcctggccaacatggtgaaaccctatctccactaaaaatacaaaaaaaaattagccaggcatggtggtacatgcctataatcccagctacttgggaggctgagacaggagaatcgcttgaatcagggagacagaggttgcagtgagccaagatcgtaccatggcactccagcctgcgtgacagagcaagactccgtctcaatcaatcaatcaataaaacattaaaaaaaaataaaagtaaaaatagaagtaaaatatatctactttaaagggtattaaaagattcagctgggccaggcgcagtgactcacgcctgtaatcccagcagtttgggaggctgaggtgggcagatcacctgagggcaggagttcaagaccagcctggccaacatggtgaaaccctgtctctactaaaaatacaaaaaaattagccaggtgtggtggcacacgcctgtaatcccagctacttgggaggctgaggcaggagaatcgcttgaactcaggaggcagaggttgcagtgagccaggatcgccccactgcactccagccagggtgacagagcgagactccttctccaaaaaaaaaaaaaaaagattcagctgcaggttgggcacagtggctcatgcctgtaatcccagcactttgggtggccgaggcgggcggatcacttgaggtcaggagttcgagaccagcctggccaacatgatgaaacctcgtctctcctaaaaatacaaaaattagtcaggcatggtggcagacacctgtaatcccaactacttgggaggctgaggcaggagaatcacttgaacccgggaggcagaggttgcagtgagccaagatcgtgacattgcactccagcctgggtgacagacatctcaaacaaacaaacaaaaacaaaaaaaaagatttgtctgggctcagtggctcacacctgtgagcactttgggagttcaaggcaggacgatcgcttgagcccaggagtttaagagcagcctggccaacatggcaaaactccgtctctaccaaaaatacacaaaattagccaggtgtggtggtgcacacctataatcccagctactcaggaggctgaggtgggaggatcacttgagcccaggaggttgaggctaaagtgagctgtgattgtgccactgtactctagcctgggtgacagagagaaaccctgtctcaaaaaaaaaaaaaaaaaagccaatttaaaaataaataaataagtgaaagattcaatacctgtaaagcaccttctcctgcctggcatagaacagggctgtctggagatagcagtgtggttatgatttctgctgctgttcctagtgtgacagtataaggggataggcatgtaatgtggtgacaggcagacaaggatttgaatccaggccccgtaatatcacttgcatgaggcaaggtctctctgagcctcagtttctttgcctatataatgggcactgatatgtcaaccctcaacttgaacttgaggattcaagttccagctgcccacccatccacccaggatggtgtgaagaggacttgggattccaacaggccctggaagggatgacctttaaggtcttgctggtctagcaaggctgaactataaatagtccccagactctggcaggccctataacagggatgaccagcagagcccaggggttgccacactttgggggataaaatctcaccttaccacacccttgagtagtacaggggttacaacctatacaaaatcccaaaagcatgtgacccttttgacctaacagcaacccttccaggaaccacccttcagatgagtgctcacaggtgcacagaaggcttatagcgctattgtccatcctgcaagaggctagggacaacttgaatattcatgaataggggctgctaaaaacaagatgtgaactccctgactggcagacactcactactcagtcttgttcatagctatatccttggtgcctgcatctagtcctggcacagagcaggggctcagtaaatatatgttacatgaataaacaaatccatgggatttttttttttaatttgtagacatggggtcttgctatgttgtccaagctggagtgcagtggctgttcacaggtgcatcatagtgcactccggcctcgaattcctggcctcaaacaatcctccaacctcagcttcaggagtaaataggactacagatgtgtagtcctccagcccaataatgggacaccacataaccattaaaaagaatgaggggccgggcacagtggctcacacgtgtaatcccagcactttgggaggccgatggtgggcagatcacctgagctcagtagttcaagaccagcctgggcaacatggcgaaatcccatctccacaaaaagcacaaaaatttagctgggtgtggtggtgtgcacctgtagtcccagctattcaggaggctgagatgggaggatcgcttgaatccaggaggtcgaggctgcagtgagcaatgattatgccactgcactccaacctgggcaacagagtgagacactgtctcaaaaaaattataaaataaaaaatattaaaaagataaaaaagaatgagacttacatgttctcaacttattacgtgataaaagcaaatatggaaacttactggaagaaaatgtgtgaaagtatcaacactggttatctctataagatgatccctttacactctcgttggtaattttttttttttaagagacagtgtcttgctttgttgcccagattagagtacagtggcataatcatagtttgggtacagccttgaactcctgggctcaagcaatcctcctacccagcctcctgagtagctgggattacaggtgcacaacactatgcccagctaatttttaaaaaattttttggccaggcacagtggctcacgcctgtaattccagcagtctgggaggccgaggcaggtggattgcttgaggtcaggagttcaaaaccagcctgaccaagatggtgaaaccccatccctactaaaaatacaaaaattagccaggtgtggtggcaggcgcctataatcccagctacttgggaggctgaggcaggaaaactgcttgaacctgagaggcaaaggttgcagtgagccaagatcgtaccactgcactgcaacctgggcaacaaagcaagactcggtctcaaaaaaaacaaaaattttttgtaggccaggcacggtggcttatgcctgtaatcccaggactttgggaggccttaggcagatcacttgaggtcaggagtttgagacttggccaacatggtgaaaccccacctatactatatacagaaattagccaggcatggtggcacatgcctgtgatcccagctacttgagaaggtgaggtaggagaattgcttgaacccaggaggtggaggtttgattgagccaagatagtccactgcactccagcctgggtaacacagtaagactccacctaaaaaaaaaaaaaaaaaaaaaaaaaaaaaaaattgggtcaggcatagtggctcatgcctgtaatcctagcactttgggagtccgaggcaggtggatcacctgaggccaggagtggcgaaaccccatctctactaaaaatacaaaaattagccagatgtgttggtgcgcgcctgtaatcctagctactcgggaggctgaggcacgagaatcgcttgaacccaggaggcagaggttgcagtgagccgagatcatgccattgcactccagcctggccaacaagagagaaactccatctcaaaaaaacaaaaacaaaaacaaaaaaattgtagagacgaggccttgccatgttgcctaggctagtctcgaactcctggtctcaaggaatcctcccacctcagcctctgaaagtgctggaattataggcatgagccacttatttttttttcgagacagggtctcactctgtcacccaagttggagtgcaatggcacaatctcagctcactccatcctccacatcccaggctcaaatgatccttcagcctcagcatcccaagtagctgggactacaggaatgtgccaccatgcctggctaatttttgtaacttttttttggagagacagggtttcgctatgttgctcaggctaagctggatatttttgaatgagtatgtattactttttaaattttctaaaaaatctagtttatttttcaaaaatataccaccacataccaagccatacaagccatagttcagagataatgctcgtatcaactcggaagcctagattcagggttctagaatcttagtgatgggagaaagcagtacttattgagcgcctactatatattggggccaagctcaactctctcgaacacaccttcaccttatttcaccaatttgatgagatgaattaatatccttatttatgttcatttttattacttttttctttttttttttttttttttgagacggagtctcactctgtcgcccaggctggagtgccgtggcgtgatctcagctcactgcaacctccacctcctgggctcaagcaattctcctgcctcagcctcctgagtagctgggactacaggcacgcgctaaattttgtatttttagtagagacggggtttcaccatgtttaccaggctagtcttgaactcctgacctcaggtgatccacccgcctcagcctcccaaagtgctgggataacaggtgggagccaccgcacccagccatagtatctttatttaatgggtgagtaaactgagtctcagagaagtgacataacctgtagtgcagataagtatttaagaaaatgagttttcgccgggcgcagtggctcacacctgtaaatcccagcactttggaaggcagaggagggcggatcacatgaggtcaggaattcgagaccagcctggctaacatggtgagatctcatctctactaaaaatacaaaaattagccaggtgtggtggcacatgcctgtaatcccagctactttagagactgaggcagaagaatcacttgaactggggaggcgcagattgcagtgagccgagatcgtgccactgtactccagcctgggcaacagagcgagactccgtctcaaaaaaaaaaaaagattatgggttttcagccaggcacactggctcacacctgtaatcccagcacgtcaggaggctgaggcaggagaatcacttgagtccaggagtttgagaccagcctggacaatatagtgagaccctgtctctacaaaaaatcaaaacaataatagctgggtatggtggcacatgcctgtagtcccagctactggagaggctgtggtgggaggatcacttgagcccaggaagtcgaggctacagtgagccgtgatcatgcaactgcattccagcctgcatgacagagtgagaccctgtctcttacaaaatttttgtttttgattaaaatatatatatatgagttttggcatctgaaagacttgagctcatattccatctctgccatactgtgaccttgggcaagtaatgtcacctctctgagcttcagtgttctcatctatacaatgaacaatgtacctaattcacagggatgacattgaggattcaattaaataacatagggaagggccgggcacggtggctcacacctgtaatcccagcactttgggaggccgaggcgggtggatcacctgaggtcaggagttcgagaccagcctggccaacatggtgaaaccccatctctactaaaaatacaaaaaattagccaggcatggtggcacgcgcctgtagtcccagctactcgggaggctgaagtaggagaatcgcttgaaccagggaggtggaggttgcagtgagccgagatcgtgccactgtactccagcctgggcaatggagcgagactccatctcaaagaaaaaaacaagcatagggaagggacttagcacagtaggtgctcatggtgttgagcacagtgtggatgctcaataagcagcagatgctaccatcctgattattatcactattatttcctccaccaccagcagcagccagggtcacacagctcgtcagggccagaacctgcctacagaggcccacaagacattttaatcaaggtccggggaacaggccagggctggattaagccaagttttgtttgtggggagtcacatggtccaaagctatgcgtgtgcacagccaagtaaacttttccttgagaacaatggtcagaacaacaggtctttgcggccatgggagaactgaacaggagttccattcatgccctcttcctgggacaggggtccctccagcatctctggggcacagcatgactcagctaagttgaaacagggtggccccaaattagctacatccagaatgacatcccgcttttgacagtggtgatgcatcaagccagatcaaaggcaggacacctggcagtggccatcttcctgggaagagccagtagggagctggccttagagttctgaggactcagaacagaaaagctcaagagtcagtcaagctcagcatgattctcaagtcccatcttaaacatttaggaaagtcaacagcaattgaaaaggtgaaaggtaaagtagaaagggtccaagatataccccactgatcagtctccaaacactcaccaagatctaatgtatgttgggctcagtgccagacctgggggctgagagacaagctacatgtggttcctgccctcaaacagcttccagtttactaaagaaaacaataacaggatcaggcgcagtggctcatgcctgtaaccccagcactttgggaggactgctagagcccaggagttcaagactagcctggacaacacagggagaccctgtttctattaattttttttaattaggcaggtgtggtagcacatgccgtcgtcccagctacttgagaggctgagataggaggatcgcttgagcccaggagttgaggctgcagtgagctgcaatcacacctctgtgctataggctgggcaacagagtgagatcctaaataaataaataaaagcctgatctctatgagggctataccttccttactttatataaagcactaaaattcactttattaattttttttttttgagatagagactcactctgtcacccaagctggaatgcagtggtgcaatcttggctcactgcgacatccacctcctgggttcaagtgattctcctgtctcagcctcctgagtagctgggattacaggtgcctgccaccacgcccagctaatttttatatttttcgtagagatggagtttcaccattttggccaggctggtctcgaactcctgacctcaggtggtccacccacctcagcctcccaaagtgctgggattacaggcgtgagccaccttgcctggccttagtattattttttgttttttgtcgggtttttcttttttcttttttttttgagatggagttttgctcttgttgccccaggctggagtacaatggttcgatcttggctcactgaaacctctgcctcctgggttcaagcaattctcctacctcagcctcccgagtagctgggattacaggcgcgtgtcaccatgctcagctaatttttgtatattattagtagagacggggtttcaccatgttgcccaggctagtctcgaacccctgacctcagttgatctgcctgcctcagcctcccaaagtgctaggattacaggcatgagtcaccgcgcccagccagcattatttttaatgcatgacaggctcactgttgtcacagtcctgccagccacactggaatgggaggagggaagggtgttttccttgaggctgtccctccctcttcccccaggcctggccttcaagggcccaggctggccctggcttgaggtctgcacacacaacgggcctctcgaagcagcggacagacacttgttggctgccaacttgggcccagactgtggtcacaaacacacccctctggctgagaacaggatcaggacatttctgcaaacccctgacctagtagaagaaatgttctaggaggcaggttggggttgctgaggctcagctgagcccccaacttaggccagggaagtaaggctctagctgacacctggagtttgctggtaatgcttgttctcccaggacatcctcaggggattcactatccactgagctggaaaaatatccagttgccttgccaagttcacatccaaaggacaggccatccttccatggccccttggaggcgtcctcagtaatgggatgtgagtggggaaatgttgaacaatgtggtcagtgattcaactccggggaaacctaggcccagagagggtcccaggaaccctggctgctccagactggtgcaactgccaggcccagaccttctccactccccaaagtctcaaggaccagccacagcccagcatcctcctatccttcagacctctctgatcactcttgccattcagagattcctgactccagtgccttccaccactcctcctcccctctttgtgctatcttgagtggaatgacctccttccatgagatcttgggccaggagaataggtcgaaaaagacttcaactaaggaaaagtggggaaaaacatgaaggccacattcttctttctcttacccaggccataggcagggttcaccaaggaatgatctcgtcctgtgaaacatctcagagaatataagagcaggggcccctcagtcctgggatgatacacatgttacttctctactgcatctgtagtagacattgctaatcaattccagctcctttctgctgagcccagacaaagcctcccaatccttccaaatatggaactcacagaaccaccagtggagctgacgcttacactcttttttttttttttcctacagagatgaaatctcactgtgttgcccaagctggtctcgaactcctgggctcaagtgatctgcccacctaagcctcccaaagtgttgggattacaggcgtaagccaccacgcctgcctggagctgccactctaaataaaagctattgatcacctctgatctagcctaacttcaataggaaaactgagtcccctagaaggcaagggtcttacccaaggccaaacagagatttattgcagagcagacaggatttcaggcaccagctttttttttttttttttttttttttttgagatggattcttgctcttgtcgcccaggctggagtgcagcggcacaatcacggctcactgcaacctccgcctcccgtgttcaagattttcctacctcagcctcctgagtagctgggattacaggcacgcgccaccatggctcagctaatttttgtatttttagtagagacggggtttcgccatgttggccaggctggtctcaaactcctggcctcaggtgatccacccgcctcagcctcccaaagtgctgggattacaggcgtgagtcacagcacctagccaccggcttttaaagagtttctgtaggccaggcatggtggctcacgtctgtaatcccagcactttgggaggcccaggcaggcagatcactgaggccgggagttcgagaccagcctggccaacatggcaaaaccctgtctctactaaaaatacaaaaattaaccaggccgtggtggtgcacacctgtaattccagctacagaactgaggcagagaatcgcttgaacctgggagaaggaggttgcagtaagctgagatcgcactactgcactccagcctgggcaacagagtgagaccctgcctcaagaaaaaaacacagtttgtgtagaggagatagtgtttatgttttgtctaccctaccacatggtgagctccttcaggagaggccctgggtgtagtttagcttctgaccttaatatacacagcaggcacacagtagatgtccatgaatgtctcttggcttagtgaggaggaatgcatgacatgagttagagggaaggcttgagtattcactcctaaagtcagaagatgcttcaaggtcacacatttacagatactaccttctcaaaacgacatacatgggaacccagatagatacatttttaatctaaagatgaggaggtgggccgggcgcggtggctcacgcgtgtaatcccagcactttgggaggccggggcgggcagatcacaaggtcaggagatcgagaccatcctggctaacacggtgaaaccacatctctactaataatacaaaaaattagccaggcgtggtggcgggcacctgtagtcccagctacttgggaggctgagcaggagaatggcgtgaacccgggaggcggagcttgcagtgagccgagatcccgccactgcactccaacctgggtgacagagcaagactctgtctcaaaaatataaataaataaaaataaaaaataaagatgaggaggtgaggggacctccgtgtgaatgtggatttgaattgtgtctatagcagaaattttaccatagactaaactttcaaacaacagaagctaaaagagctttcaagtcaactaaaatatgacatttcgatgaatgtcagtggtttcaaaccgcattgctgactataaatatcaaagtaatgaggcatgtggggaaagtctcttatatccatatcatttatgtggcattctattatttaactttgccattaaaatatgattgatacacttaagcttctaaggatcaacactctagagtcagctttttttaagtatcaaaaaaatgcatctagactgggcactgtggcctgcaatcccagcactttgggagacttaggtgggaggatcccttaagcccaggagttggagaccagcccaggcaacatggtgaaaccctgtctctacaaaaaattggctaggtgtggtggctcacgcctgtaatcccagcactttgggaggccgaggcaggcagatcacgaggtcaggagttcgagaccagcctggccaatatggtgaaaccctgtctctactaaaaatacaaaaaaaaaattagccaggcgtggtagtgcgcacctgtagtcccagctactcggaaggctaaggcagaagaatcgcttgaacctggaaggcggaggatgcagtgagccaagatcgcgccactgctccagcctgggcgacagagtaagactccatctcaaaaaaaaaaaaaaaaaaaagctaggcgcaggggctcacacctgtaatcccagcacttttggaggctgaggcaggtggatcacaagctcaggagtttgagaccagcctggccaatatggtgaaacctcatctctactaaaaataaaaaaattagccgggcatggtggtgggtgcctgtaatcccagctactcaggaggcggaggcagaagaattgcttgaacccgggagacggaggttgcagtgagccgagatcatgccactgcactccagcctgggcaacagagtgagactccatctcagaaaaaaaaaaaaattaaccaggtgtggtggcatgcatctgtagtcccagccactcaggaggttgaggtgggaggattgtttgagccccggggggtggagggtgcattgagccaagatcatactactgtactccagcctgggtgatagagcaagaccctgtctcgaaaaaaaaaaaaaacaagaaaaaaaaatgcatccatggcatttaaatagatatacctaaaatataaaataaaactttacattttattttctttatttaaattttattttattttatatctgggtcaaccaaggaccgagaacctatttgcttctgtggcctcttggacactcctttagggaaaccaaggcaacccaccaggatttgggcctgggactcaactcagcagcttctctggccgtgttattctccatcagcccccgccacctccctgtgcctgttctgggccataagccagagacacattcctcaggcccccacggggcttccagagctgacagagtttgaggaaagggctgagcaaagcagaaacctcttgagagacatggcacaagatggtcatgggacaacctcagcaggaggcgtgtaacaactgatggggaaaccgaggcccacagagggcaagggtcccacccaagaccacactgtgagggaacagtggagaaagccattcaaccaaggttcctccacaaaactcctctctgatcctggctggaaggatttgatgtcctactctataaaagccaaggcctctgggcgtggtggctcatgcctgtaatctcagcactttgggagactgaggtgggtggatcacctaaggccaggagttcaagactagcctggccaacatggcaaaaccctgtctctacaaaaatataaaaattagctgggcatggtgacgcacacctgtaatcccagctacttgggaggctgaggcaggaggatcacttgaacccaggaggcagaggttgcgatgaaccaagatcatgccactgtattccagcctggacaacagagcaagattccatctcaaaaaaaaaataaagtaaaataaaagccaaggcttctcccaaaggaggatgggtcttggggttttaaggcccaggcactaaaagaacctgaagtcaagagctctccaggccccacaggaaagaatctgacctgccccttccccagtccgcacccctctctccctgtgtcactcaggtgctggcacactctgccatgtacatttttgccctagtcgcaacaacccagaaaggcaggagctacatccctgttttacaaatgaggaaactaaggatcagggaaatgaagtgacttgtccagggctacacagctagtgactggaagacagaaaatgcaaatcaggtctgcttggctctatgccaactctccctccaccaccccacactgtcttcaggcaggtccccaaattctgtttctgttttcagtcctgcccacctcccagcccccagtgctgggatggggccttctgaggcctgggggaggtagagaagcagtggaacacctccacccagcccctctgaaccctggaacgtcagtgcttaccctccagcaccacctccttgcctgtcttcttgaggacctgcaccgcctcatcatgggtagcagaggacaagtcttccccattcacagacaggatggcatcccccacaaaaagggcctctgtctggtcagctgccaatcccttgaagatcttggaaatgagaataggcatcttgttctcccggccgcctgcacaggtacagaaggaggacaagacttaggcagatactccaacacttgggagtcacatcaagacacaattatttctgaaggcttcccttggtgcctagcccagtgctggaaaaggcaatgggagaataaagggaatctgagaaaaatcttggaagtttgggacactagtaacactaataataaatcatttttgattaggtccggtggctcatgcctgtaatcccagcaccttagaaggctgaggtgggcaggtcacctgaggtcaggagttcaggatcagcctgggcaacatgggaaaaccccgcctctactaaaaatacaaaaattagccaggcacctgtggtctcagctactagggaagctgaagtaggaggatcacttgagcccaggaggtcgaggctgcagtgagctgagattgtgccactgcactccagcttgggtggcagaaggagaccctgtctcaataaattaattaattaaataaatcattttcaaaattcataatgctatagtttgatccctggatcttttgattaagtgctttgggtgttcaccagtgtttgtgcaacttacaaagtgcttcaatcactttttcttaaatgttttcgattttctcatgtaacccataaatatatatgcctactatgtacgcacaaaaattaaaaatgaaaataaccggacaaagtggctcacacctgtaatcccaacactttgggaggccaaggtggtcggatcacttgagaccagtagtttgagaccagcctggccaacatagcgaaatcctgcctctactaaaaacacaaaaaagggccaggtgcggtggcttatgcctgtaatcccagcactttgggaggccaaggctgccaggtggatcacctaaggtcaggagttcgagaccagcctggccaacatagtgaaaccctgtccctaccaaaaatacaaaaaattaactgggcgtggtagcggatgcctgtaatcccagctactcgggaggctgaggcaggagaatcacttggacccaggaggcggaggttgcagtgagctgagatcacgccattgctctctagcctgggcaacaaaagtgaaactctgctcaaaaaagtaaataaatacataataaaaaaataaacaaataaaaaaatatggctgggcgtggtggctcacgcctgtaatcccagcactttgggaggccaagatgggcagatcacctgaggttaggggttcaagaccagcctggccaacatggcaaaaccccatctcttctaaaagtacaaacattagccgggcatgggggcgcatgcctgtaatcccagttactcgggaggctgagtcaggagaattgcttgaaccgggaggctgaggttgcaatgagccaagattgcaccattgcactccagcctgggcaataagagcgaaactccatctcaaaaaataaataaataaataaataaatacaaacacaaaaaattagctgggcctggtggcacatgcctgtagtcccagctactcaggaggctgaggcagcagaattgcttgaacccaggaggtggaggttgcagtgagccaagatcacaccactgcactccagcatgggcgacagaacaagactccatctcaaaataaaacaaaaatacaaaaattagccaggcatggcggtgtgtgcctataattccagctactcaggaggctgaggcacgagaactgcttgaacccaggaggtggagattgcagtgagccgagatcgcaccactgcactccaccctgggcaacagagcaagactgtctcacacacacacacaaaaaggcaacaatgtgggaacccactgatacccctcaaaccggaatcaagagacaagtcggctattcctatggcctcaaaagactgctttagcaatcataatgttttacaatccaaagtccaggctggaaaccaaagccttagagtctagagattctaaaaacctgcctgaatggcatcttggatacaaaagaagctaatacattttactaaacatctttattaccaaactcttaaatgcccttttaaaataagaaatagtaataagagttcaccttagttgcacttaccaaatgccaagcactgtgctaaatgctttcaatgttgattcattgcgtctttacaataccccatcacataggtatgttcagtttcctattagggaaactgaagtgtggagggaagccccttgtccaaggtcactccactagtaagtagcgaagccagtatttgcacctaggcctccaggctccagaaccaacactattagccctaccacagacgacaagtcaggccctcagatatcacactcctggctcatccccagaatactgaagatgaagaattagtggcccagagtgggaggtcattgttccaaggtcacacaagtctggtggcggagctgggactggaacacctctcttgacgcccacacaggcccgaccgtttgcttatctgcacagagcttgaagtctaggagaggaaggggtttctatttatatctgccctcccccacctgaaactaggggcttcagttcagtttgaagctatgatcactcatggctgcctcagactaagctagactttataggaggggttaccatggcaacaggagcccagatttggatccaatggaaatacctgaagtctcctaaaagtaccctcccctccacctagaattatggagctggggagtaactttgtgtgaccttgcaaagtccctgctcctctctgagtctcagtgtgtccatctgcagaatggaattctgtatgaataagttccttcctgctttgacacactgagtgtataatttttggattcatctgttgccctatcccatgctggagattgggggtaagactggtgcccataccctcattttctcatttctcctttttagcccctcttggttggctgcctggggatctgcccttctacaggaaagaatcaacttccctgagcactctctgagggacagtagctgataattaaggttcaaatcccagcactgacactcactatgtaatcgtgggaaaatcattttaactttctgagtctcagtttcttcacctgcaatatgggaattatactccctacctttcaccacttgttgccaggatgaagtggatcatgagactagtgtcctgggcacagcacctggcacacagtggtggcattcaccaccatccccaccgcctcagccaagccaaacggtctggaggcactagtcaacagaaccagtaccagggagaccccagagggtacggtatgtattcaaggtggagacaaaggctgataccctttcccaaagcacctgctgggggctgggaccctgagaaacagatgggcaggaatagtgaacccagcagctgggggtgtgcaaggattttaacaactatgtttagttgctttgggagtatctgctggcctccatttttcctctccgctaacagcagtaattaactaggcacctacagtgtgctggtgtggtgagccctgctctcagaaacatcacaactctgtcatcctcttatacagttgaggaaacagattcagaggcgggacgggacttttgcaacctcacacagctgatcctggattcaaacacagtctggttgcaccctaactgcaccccactagcggtcagtcctgggggctgaaagctctatcctgtgcaaggtggagatagtcagatcaggagacccaaatccagctgtcagggctccctgcagccttcctgggtccttagattcctaggtccttgctggccttctgcctgtgaccccagcctgtgcctgcacccaggcctcctatccacccctgtgcttcccagactccaggcttcccctctgcacccaccttggttgcttctcagggactccctcctccctgtcccactggtgtcccggcctcaaccccctttctccacactctgctttccgggggacccctcttgtccttgatgttcatgctggttacccctcagacccccccgcctccacacagaactcccacccacgtgtccttggtgctcccacaatcttatccacacctgtgtcttccgtgccccctaaggccaccaactactgaaaccccctccaaccttggtgtgcccagtgccctccgttacctgtttcctcagaccccccttacccccagacaggaagcctccagctccatgtcctgggcgcgctgccagccccctgcgccctcggctgcccccagacaccacgaccccgcgccctcggtgtcccgcgcccacctttgatgctgatgcccagcccaccggcgtcggccttgcgcaccgtcacgcggcgccgctggagcagtagcgcctctggcagctgcgggggcccggcgcccggctccgcggcgccgttgagctgcgcgggctcctgctcccgcggagcgccgggctcgggaccagggtcgccgtcggcggggctcacggtcagcacgtcctccgccagactcagcagcacccgctgccatcgctcgccgccggcccccgagcccgccccggcgcgcagctccagcagcccggtgcgcggggcgcgcctgccggacgccatcttcgcctccgagcccccgggccgccgcgctcgccctgtcccgctttgcccagcccgctccgaccaagcgcccagggcagagggcagcgggggcccggctgggccagccgccaccctaccccggccgctgggggaggagctctgggggcggggctaccctggggtgtggccagtgctggggagggggcctcgggcaaatgcaggaggccggggcggggcccgggagccgagggccgccgtgtgggactacctagcggggtgggtcagaagggcggcggggcgggccactaagtaaggcgaaagcccgggaggcgtggtgctgggcggggcgtcagggggcggggcttcgcgtcgggggcggaacccagtgagcccgcgcagggggctcggcgctcggaatgcccatcgagggccgggactgtaactcccggacgtgggagcgcatgaaaaagagacagaaccacgtatcctggtgcgaagcactgggcatcgggctgggctgcatatggcggagggctgggctgcgtatggtagagcgttggactccaaggcttgagtttaagaggtagacaccgtctgggcgtggaggctcacgcctgtaatcccaacactttgggaggcctagatgacagcccagaagctcgaggctgcagtaagccgcgatcgcgccactgcactccagcctgggtgacagagcgaaaccctgtgtcaaaaaaaaaaaaaaaaaaaaaaggtagatgctgagccgcgagagaccttgcgggcacagttgctagttggggagctgaggaagaagttggtttcctatcggggagggcgggggatggggggtgggggtcgaggctttggtctgtgggcgtggcttatcgctggcgtggcttctaaagatgacaggccccgccccctggaggagaccgctaccgacaccgcttagggcttgggggaggtgtgggcaggatccccacttcaaaactggagggaagtttaagagattaacccctggctgtgttcacagtcgagtatagaaaagcctgaagtcccacactttgaggcctggcagaaaaaaaacagaactggtgtgtgggaagagggttgcaaggtggggctctgggtctgggcgactggagacatggtttctaatctttgctgcctctgttagctccaagtcgactttggtcccctcacgtcactgctctaggcctcaatttcctcatctgtaaaatgtggatcataataatacctacttcactgggctggtgtgaggattaaatcaatgtgaaaacacgtggtaaactgtgactccctattctatagaaataatcactttcatttagtgaatgcttactcttacctagggctggcagaatattttccaagtgttatctttacattagcctcctggagtagctaagagcacccccagctgggcacagtggctcacacctgtaatcacagctgaggtggcaggatcgcttgagccttggaggtccaggctgcagtgagctgtgattgcaccatcacactccagccttggtgacagagcaagaaaaaagagcacccctattatacagaagggaaaacttggatttagtctaattggcctaggtcacacatttatgagtgaggaagagctgcgattcaaacccaggcctgtttgacaccagtgcctgggcactgaaccactctgctagacagctgacaaatacagaggtaaagcatgattgtaatctgaaaaatccaccacatcacacagctcaactggccttcatacctgctccttgtctctatcctccattcctagctgggatatgttgagcaataaataagtaggactacaccagtgtttagcctccctgaacttttgggtaaaatcctccacataagataccatcaagaaaaaaaagagggggccaggtatggtggctcatgcctgtaatcccagcactttaggaggccgaggcaggtagatcacgaggtcaggagtttgagactcagcctggccaacatggtgaaaccccatctctactaaaaatataaaaaaattagccgggcgtggtggcagacacctataatcccagctactcaggaggctgaggcaggagaatcacttgaacccgggaggcggagattgcagcaagcagagattgcaccactgcactccagcctgggtgatagggtgagactccgtctcaaaaaaaaaaaaaaaaaaaaccaacaacaaaaaaaaggaattgttttaagttagagtggtaggtgtcaaaacaggagagacacaggttttaaaaaaagaacccagggtcttttatacatatatatatgggatgccgaggaggaatgatcacttgaggctaggagtttgagaccacttgggcaacttcacgagactccatctctacaaaataaagaaattagccaagcgtggtaatgtgcacctgtactcccagctacttaggaagctgcagcaggaggcctgtttgaggctgctgctgtgagccacaatcatgccactgcactccagcctgggtgacagagcaagaccctgtctcaaaaataaataaaagaaagtgagaggaaggaaggagagaagggaggcagggaaggaatatagcattgtatataagcattgatatcttaaaagtatgactgtgcttaaagattgtaggacagcctgaggaatttggggtaagcacttgtgataaataactacagcctacttggcttgtggaagcttcactccaatggtagagaagggaggggaggacagacctggcaggaggcaagagaccagcagggaattgaagctcctttcccaagaccaaagcctggaaccagatccttaaaagtccccccacgtactgccctgcttaaaaaagacttaatgaggcccagacaaacttactgagaaagagccctaagagagggcttctcctctgggggacagtttcctgtggatataacaggaaggaaggaagtagggaaaggagtgatgtgtgcaaaggggctaacacagaaagaagatgtagagccaaggaaacagtgacgtgtgtatgcatatgtatacgtctgtatgtgagtatgggtgtgtgtgtttgtgatcacacttgataggcagtgccaatcacctgtagctacccccaagaaccctgtagctgcaggaatgctctatccctacactgtggtcagccgatgcctctctgctgtggctcagaaattggcctcccagatagatacacataggcccggctccctgccaagccccaggcagagctcccagagaaaaccagttcactcccaaggaataggagagggggaaggggaaaaaaagggagagaggggagctgcccagcctactaaagtctctgcaagctctggccaggcgcggtggctcacacctgtaatcccagcactttaggaggcctaggcggctggatcacctgaggtcaggagttcaacagcagcctggccaacatggtaaaaccccattctctacaaaaatacgaaaattagctgggcacggtggctcaagcctgtaatcccagcactttgggaggccgaggtgggcagatcacgaggtcaagctatcgagaccatcctgaccaacatggtgaaaccccgtctctactaaaatacaaaaacttggctgggcacggtggctcatgcctgtaatcccagcactttgggaggccgaggcgggcggatcgcgaggtcaggagatcaagaccattctggctaacacagtgaaaccccatctctactaaaaatacaaaaagaaattagcagggcgtggtggcgggcgcctgtagtcccagctactcaggaggctgaggcaggagaatggcgtgaacctgggaggcggagcttgcagtgaaccaagatgtgctgctgcacctcagcctgggtgtcaaagcgagactccgtctcaaaaaaaaaaaaatctatgcataaatcctaaacaatctactgtttagttttacattttttaacatcacataaatggacatttctccttctgcttttggaagttatattctctagttgtattaagagcactctattatcttcaattacttactctcccaaattatttgctatgttgttaagtatttagcgctaaatatttttctttttatttatttattattattatttttttaagacggagtttcactcctattgcccaggatggggtgcagtggcgcgatctccactcactgcaacctccgcctcccgggttcaagcgattctcctgcctcagccttccaagcagctgggattacaggcgcccgccatcacacccagctaatttctgtatttttagtaaaaacagggtttctgcagtgaaaccccatctctactaaaaatacaaaaaattggccaggcatgttggtacacgcctgtagtcccaccttcttggaaggctgaggcaggagaatctcttgaacccaggaggcagatgttgcagtgagctgagatcacaccactgcactccagcctgggtgacagagtgagactctgtctcaaaaaaaaaaaaaaaaagggggtttcaccacgttggccaggatggtcttgaactcctgacctcagatgatccgcccacctcggcctcccaaagtgctggaattacaggtgtgagccatcgcacccagcctctttttatttagttttttattttattttattttattttattttgagactgagtctcactctgtcacccaggctggagtgcaatggcactatcttgactcactgcaacctctgcctcccaggttcaagcgattcttccaactcagcctctagagtagctgggattacaggcacatgccaccacgcccagctaatttttgtatttttgtagaaacggaatttcaccatgttggccaggctggtttcaaactcctgacctcaggcaacctgcccgcctcagcctcccaaagtgctgggattacaggcatgagccactgcacccagcctgaaggtggcaggcaaagctttctatcaaagaaggccaaatgcctcttgcccaatctttaattatctcttaaattagaatatcttactcaaatctccatgtctcttaactttctttcatatcttctctttacttttttccatactgcattctgagtaatttcttcagtgatatcttccagtttactaattctttctttaactagaactaatctactgtttatcctattctttgaatttaaaatatcaattgttacttttttatttctagaaattctactttttttttttttttttttttgagacggagtctcactctgtcacccaggctggagtgcagtggcacaatctcagctcactgcaacctccacctcctggattcaagcaattctcctgcctcagcctcctgagtagctggggttaaaggcgcatgccaccacatccagctagttttggggttttttttgtttgtttgtttgtttgtttgagatggaatctcacactgttgcccaagctggagtgcagtgtcacgatctcagctcactgcaacctctgcctcccagcttcaagggattctcctgcctcagcctctcaaatagctgggattacaggcacctgccaccacgcccagctaattttttgtattttcagtagagacagggtttcactatgttggccaggctggtctcaaactcctgatctcgtgatccacccacctcggcctcccaaagtgctgggattacaggtgtgagccaccacgccctgccataatttttgtatttttagtagagacagggtttcaccatgttgatcaggctagtcttgaactcctgacctcatgatccgcctgcctcagcctcccaaagtgctgggattacaggcataagccaccatgcccggccctacttttttttccacatctgtctgattatgtttatagtatctttttttttttttgagacagagtcttgctctgtcccccaggctggagtgcaatggcgtgatcttggctcactgcaacctccacctcccgggttcaagtgattctcttgcctcagcctcccaagttatctgggattacaagtgcccacaaccacccccggctaattttttgtatttttagtagagacgggggttttgccatcttggccaggctggtctcgaactcctgaccgcaggtgatccacccgcctcagcctcccaaagtgctgggattacaggcgtgagccaccataactggcatagtctctctattctttacccatgcttttgatacccttttgaaatgtatttaaacctatgaattgtacttattttatattatctatatagtagttcttttttgtttttattttatttatttatttatttttgaggcagggtctcactctgacgcccaggctggagtgcaatggcatgatctcagctcactgcaacctccacctcccaggttcaagcgattcttctgccccaggctcccaagtagctgggattacagacatgtgccaccactcgcaactaattttttgaatttttagtggagacggggtttcaccatgttggccaggctggtctcgaactcctgacctcaaatgatccacccgcctcggcctcccaaagtgttgggattaaaggtgtgagccaccgcgcccagcctctttttgtttttaaagagacggggcttgctttgtgatgcagactggagtacagtggcatgatcctagcttcctgcagcctctaactcctgggctcaagacaggcgagccccaaattgggccttagcctgggaaagttcttggcttctcccaggaaataattcaaaggtgagccagtggtatcagacagcaacttttattgaagcagcagcgtacagcagcagcagagggactgcccttgcagaggagggttaacacacaggcagtgtgcccagaagagtttcatatgggctgggggcagctgtatttatacccactttttttttttttgagacggaatctggccctgttgcccaggttggagtacagtggcatgatcttggctcactgcagcctctaccccactgattccagagattctcctgcctcagcctcccaagtagctgggattacaggtgtgtgccaccacacctggttcatttttttgtatttttagtagagatggagtttcactatgttggccatgaactcctgacttcaggcgatctgcccgcctcagcctcccaaagtgctaggattacagacgtgagccaccccgcccggcctagacccacttttaattatacacaaattaagaggcaagttattcagaacgttctggaaaatggacagtttctggaaccatataaggtaacttctgggccattgccatggccattgccagagcctttctaaactatcatggcactagtgggagtgtctttatgcaaatgagcagtgagggcaactagcggtcactttagtcaccatctgctgattttggctggcgtcttcactgcaccctggattgaccagtttctgctctgatcagcgggatggtgaccagtcataaccagtgcttggaaaacaaatcttgctgatctacctcaaaattcctgggttcaagctatcctcctgcctcagcctcccaaagcactgggattacaggcatgagcctatatagtaattctgattctgaagtgttggtggctctttttactttttcttttttaaaatttgttttaattggccgggcgcggtggctcatgcctgtaatcccagcactttgggaggccgaggcaggcggatcacaaggtcaggagatcgaaaccatcctggctaacacagtgaaaccccatctctactaaaaatacaaaaaattagccaggcgtggtggcaggcgcctgtggtccccgctactctggaggctgaggcaggagaatggtgtgaacccgggaggcagaggttgcagtgagccgagattgtaccactgcactccagcctgggcgaaagagcgagactccatctaaaaaaaaaaaaaaaaaatttgttttaatttactttaaatagaaacggggtcccactatgttgcccaggctggtctggaactcctggactcaagccatcctcccaccttggcctcccaaagtcccaagattacaggcatgagccactgagcccagcctttttcttaaagcaataaaagaatggctactccatagacagcagctggtggatcttttttcttcattacacatgtgtaatcttgtcaactacacagtttatatgcattctttgaggtctggtatgaagtaggttctattccttcagagaggatttgtgggtacttctgtcagatgcctgatgggacagccaacctaagagtgctttcagggccgggcgtggtcgctcacgcctataatcccagcactttgggaggccaaggcaggtggatcatgaggtcaggagtttgagaccagcctgaccaacatggtgaaacacagtctttactaaaaatacaaaacttagccgggcatgatggtgcgtgtctgtcatcccagctactcaggaggctgagacaggagaatcacttgaacccggaaagcggagcttgcactgacctgagatcgcgacactgcactccagcctgggtgacagagcaagactctgtctcaaaaaaagagtgctttcagtacttagcatgaggccagtcacggtggctcacacctgtaatctcagcactttaggaggccaaggcaggcagatcacctgaggtcaggagtttgagaccagcctggccaacatgatgaaaccccgtctctaccaaaaataaaaaattagccgggcgtggtggtgaatgcctgtaatcccagctacttgggaggttgaggcagaagaatcgctcggacctgggaggcggaggttgcaatgagcagagatcatgccactatactccagccaggtcatcaagagcgaaatgccgtctcaaaaaataaaataaaataaaatattttagcacgggatcttttgattcacacaaagagtagaaatacaggttgcaatcccatgtgaggttacgaattctcagagatgctttccccctctgcccaccatgttcacgatggagaaatttctttgctggtgccctctgcaagatttttgcagtccgctctttctttcttttttttttttttttttgagatgaaatcttgctctgttgcccaggctggagtgcaatggcgtgatctcggctcactgcaacctccgcctcctgggttcaagtgattctcctgcctcagcttcctgagtagctgggattataggcacccaccaccacgcctgagtaattttttacttttggtagaggtggggtgtcaccatgctggccaggctggtctcaaactcccgacctcaggcgatctgcctgccttggccttccaaagtgctaggattacaggtgtaagccaccacacccggcccagtccactctttcaatgaggatgcaggctttccagaccctggctttatgtgggggtcacctaacagctttttcaccctgggtgggccctgggtttctctcttgccccataattccaaatgtgcatcaaaactgaagctttgtggccgggcggagtggctcacacctataatcccagcactttgggaggctgaggtgggtggatcacgagctcaggtgatcaagaccatcctgaactgggtttcaacatggtgaaacccagtctctactaaaaatacaaaaattagctcggtatagtggtgcctgcctgtaatcccagctactcgggaggctgaggcatgagaatcgcttgaacccaacaggcagaggttgcagtgagtcgagataacgctgctgcactccagcctgggtgacagaacgagactctgtctcaaaaaaaaaaaaaaaaaaaaggccgggctcagtggctcacacctgtaatcccagcatttcaggaggccgaggcgggcggatcataaggtcaggagatcgagaccatcctggctaacaaggtgaaatcctgtctctactaaaaaatacaaaaaattagccgggcgtggtggcaggcgcctgtagtcccagctacttgggaggctgaggcaggagaatggcctgaaaccaggaggcagagcttgcagtgagcagagatcgtgccactgcactccagcctgggtgacagagtgagactctgtctcaaaaaaaaaaaaaactgaagcttcttggctgggcacagtggctcgtgcctgcaatcccaacactttgggagactgaggctggtggatcacctgaggtcaggaattcaagacccacctggctgatatggtgaaaccatgtctctactaaaaataaaaaattagccaggcatgggggcacgcagctgtaattccagctactcaagaggctgaggcaggagaatcacctgaacttaggaggcagtggttgcagtgagccaagatcgagccaccaccacactccagcctgggcggcagagcaagactctgtctcaaaaataaataaataaataatttttaaaaatgataaaactgtaaagaaattgtttttaagaaaaacaaaaagttagccagtcatggtgctgtgcaccttgtagccctagctatccaagaggctgaggccaattgattgagcttgagaataaaagagttcgaggctgcagtgagctatgatcacaccgctgcagtctagactgggtgacagagtgagactgtgtctcttaaaaaaaaaaaaaattagggctgggcacggtggctcaagcctgtaatcccagcactttgggaggccgaggcaggcggatcacgaggtcaggagatcaagaccagcctggctaacatggcaaaaccccatctctactaaaaatacaaaaaattagccgggcgtggtggcaggtacctgtagtcccagctactcgggaggctgaggcaggagaatggcatgaacccgggaggcggagcttgcagtgagtcaagatcgcaccactgtactacagcctgggcgacagagcgagactccatctcaaaaaaaaaaaaaaattaggccgggcacggtgactcacacctgtaatcccagcactttgggaggctgaggcaggcagatcactgagatcaggagttcgagaccagcctggccaacatgctgaaacctcatctctactaaaaatacaaaaagttagctgggcgcggtagcatgcctgtagtcccagctactcaggaggctgaggtagcagaatcacttgaacccaggaggcagaagttgcagtgagccaagattgcaccactgcactccagcctggcgacagagcaagactctgtctcaaaaaaaaaaatgaagttgttcacagggcaggtggtggtgacctgaactagaaaggtgactgcagtggggatggaaagggctaaatataattaagaggtattaaggaggtaagattgctaagccttgctgatggcttgcgtgaaggagattaaggagagtcaatgacatatggaagatatttaaagtgtgtgacagtcttaagataacctataggaagagagcatagagaaagaagaaaaatgggccatgtgctgagccctggagtagatacaaagctgaagaggagagagcaagcatagacaaaccagctctggaagcagcacactcgctgtagtgaggggtgtataggatggtgattaacaagttttccacttaaaccagacatgaatcctgggcctgcaattctggccccacagcaagaaaatcaaccttgttgggtgatggtgatgcttcaaactgggctctgatgatgctcaattagggaggagtaagacacttccagagattagaagcacaggggcccgtacgccatggctcacgcctgtaatcccagcactttgggaggccaaagcgggtggatcacctgaggttaggagttcgagaccagcctgaccaaaatggtgaaaccctgtctttactaaaaatacaaaaattagctgggcatggttgcgggcagctgtaatcccagctactcaggaggctgaggcaggagaatctcttgaacccaggaggtggaggttgcagtgagcccagatcttcccattgcactccactccagcctgggcaacagagagactccttctcaaataaaaaaaaagaagaagaagaagaggaaacacaggggatagaaaccagggcaaagggtttggctttttctttttttttcaccctcgagacagagtcttgctctgtcacccaggctgtagcgcagtggcccgatcttggctcaccgtaacctctgcctcctgggttcaagcgattctcctgcttcagcctcccgagtagctgggattacaggtgcgtcccagcacgccggctaatttttgtatttttagttaagacagggtttcaccatgttggccaggctggtctcaaactcctgacctcatgatccgcccaccttggcctcccaaactgttgggattataggcatgagccacccggccggtttttttttttttttttttttttttttttgagacagggtctcactctgtttcttttttgtttatttctttgtttttggagaagggggtctcaatccatcacccaggctggagtgcagtcgtgcaatcatggctcactgcaacctccacctcccagactcaagtgatcctcccacctcagcctcctgactagctgtgattaccagtgtgcaccaattttttttttcccgtagagacagggtttcaccatgttgcccaggctagtttggaactcctgagttcatttgatccacctacctcagcctcccaaagtgctgggattacaggggtgagccaccacaccctgcagggtttggctttttggctggagatggtgaaaggccaggctttttctttttttttcaccctcgagacagagtcttgctctgtcacccaggctgtagcgcagtggcccgatcttggctcaccgtaacctctgcctcctgggttcaagcgattctcctgcttcagcctcccgagtagctgggattacaggtgcgtcccagcacgccggctaatttttgtatttttagttaagacagggtttcaccatgttggccaggctggtctcaaactcctgacctcatgatccgcccaccttggcctcccaaactgttgggattataggcatgagccacccggccggtttttttttttttttttttttttttttttgagacagggtctcactctgtttcttttttgtttatttctttgtttttggagaagggggtctcaatccatcacccaggctggagtgcagtcgtgcaatcatggctcactgcaacctccacctcccagactcaagtgatcctcccacctcagcctcctgactagctgtgattaccagtgtgcaccaattttttttttcccgtagagacagggtttcaccatgttgcccaggctagtttggaactcctgagttcatttgatccacctacctcagcctcccaaagtgctgggattacaggggtgagccaccacaccctgcagggtttggctttttggctggagatggtgaaaggccaggaagatgttatccttggcagagaaagattcagagtcatggtctaggaacttttagtcccaatccagaatttcatgagggaggaaccagaggcccaagaggaggtatccccagccatgtccttcccacccttgtattggtcactcacaaaagacacttgctgcgctgaagacaggctgaagatttcgcatccaggcgccacctctgacagatgccaggagggggcagcagagagccagggtcgcaaggtcctagcaggtgccatgagccctgcaagtgggaaggtgggaataggatgggaagctgggctccttgaggttgtcactttttgtttgtcagtttggttttggtttctgaggcagagtctcactctgtcacccaggctgaagcatagtagcacagccacagctcacatgcagcttcgaactcctgggttcaagtgatcctcccatctcagcctcccaggtagcccaccaccaggcctggctatttttcttttttttttttttttttaagacggagtctcactctttcacccaggctggagtgcagtggtgctatcttggctcactgcaacctccgccttccgggttcaaacgattctcctgcctcagcctcccgagcaactgggattacaggtgcctgccactaggcccagctaatttttgtatttttagtagagacagggtttcaccatgttggtcaggctggtctccaactcctgaccttaggatccgcccaccttggcctcccaaagtgctggaattacaggcttgagccaccgcacccagcccaggcctggctatttttctttaattttccgtagagatggagtctcgctgtgttgcccaggctgagattgtcactttcaaagcatgtttttcccttctccatgtgaggattacacaaccatttcacacataataccgataataataattattatcaccattattatatcagtcaccatttaatgggcccctcccatctctgcatcccaaccctccagagtcacagactgaaccaatggaaagagaaccagtgtgagggtgggcacagtggctcatgcctgtaatcccagcactttgggaggtcaagaagggtggatcatttgaggtcaggagttcgagaccaacctggccaacatgatgaaaacatgtcttggctgggcgcagtggctcaggcctatagtcccagcacactgggagcctgaggcaggtggatcacaaggtcaagaaatcgagaccatcctggccaacatggtgaaaccctgtctctgctaaaaatacaaaaattaggccagtcgcggtggctcacgcctgtaatcccagaactttgggaggccgaggtgggcggatcaggaggtcaggagatcaagaccatcctggctaacatggtgaaaccccatctctacttaaaaaaaatacaaaaaattagccgggcgtggtggcgggcacctgcagtcccagctactcgggaggctgaggcaggagaatggcttgaacccaggaggcggagcttgcagtgagccgagatcgcgccactgcactccagcctgggcgacagagtgagactccgtctcaaaaaaaaaaaaacaaaaattagctgggcatggtggcatgtgactgtagtcccagctactcaggaggctgaggcaggagaatcgctagaacccgggaggcggaggttgcagtaagcagagatcgcgccactgcactccagcctggcgacagagcgagactcgtctctttttttttgagactgaatttcgctgtttttgccgaggcaggagtatgatggctcgatctcgggtcactgcaacctccgcctcccaggttcaagcaattctcctgcctcagcctcctgagtagctaggattacaggtgcatgccaccatgcccggctcattttttgtatttttagtagaaatggggtttcatcatgttggccaggctggtctcgaactcctgacctcaggtgatccacctgccttggcctcccaaagtgctgggattacaggcatgagccactgtgcctggctgagactttgtaaaaaaaaaaaaaaaaaaaaaacacacggtgtgggggtcagaccaagggtatcaaaccctgattttcccacggcctcatcatgtgacctcaaacaggtaacaggtcacttcctcgctgtctcacttttctcatctgtaaaatgaggataataaaacaaaagactggagggttctgaaagcactaaattggccttgtgtaagcaaagtacctggcacatgagagactccatgaacttcagttccttcccctggctttattttagttatttgtttgtttgtttgcttttctactccacaatagaggtaatggactgtttttatttaaacaaatgttaaaatgtcatttaacagatattcactgtcactgtgtccctggtcctgtccttggtactggtaacatagagtggcatcccaggtgagcaggaagcagggaggcaccccctgtgcaagggcgatccccaccgagactagggtctgcctatctggattaagagccacgattccaaattcctgctgccttgccactcactatgtgatagataataatgttttgtgatcctaaacatgtcaaaatggagtcacttatgacaagtgactcagcctacagttaaactgctgacctctcaaagtgtacggtggacagaggggataacacctgctgtggtcaggcacccccaagacctaacaagaaagagaagccacagggcagctgagataatggctatggagactcttgcagagggccatgaacaccgcaataaactgaccatcacggggcgtcatggctcatacctgtaaccccaacattttggaaggatgaagtaaggagattgcttgaacccagcagttcaagataagcctggcaacatagggagacctcatctctacaaaaactttaaaaagttggccaggcacggtggctcacgcctgtaataccagcactttgggaggccaaggcaggcggtcacttgaggtcaggagttcgagaccatcctggccaacatggtgaaaccccatctctgctaaaaataccaaaaaaaattagccgggcatggtggcacatgcctgtagtcccagctactcgggagggtgaggcaggaaaatcgcttgaacccaggaagcagaggttgcagtgagccaagatcgtgccactgcactccagcctgggtgatagagcaagactcagtctctgaaaaaaaaaaaaaaaaaaagctaggcggtgtacgccggtagtcccagctacccctgaggctgaggtgggaggatcacgtgagctagggaggatgaggctgcagtaagccgtgatgatgcctctgcactccagcctgggtaacacagcgagaccctgtctcaaaaaagaaagaaaagaaaaagaaactggccatggcagagatgcctgtgggagctctaccagtgagaactctgaggcctcttttccatcaggcaaccctccgaagctctgctgggagaagagcctcggcccccccaccccttcagccccccaacccttgttggcattctgagggaaaacagtcagcacagtcatcccagagctactggagctactccctgtggcttgttcctcctctctcattactgcctatgtgttggtgtgaaagcctctcaataaaccatgaatttgtaaacatttaattggccattgagtcatcacaaaacttccctcccacccccacctcccaatcagagttagcataactaggctgattcgcacctgacacaaacacaaagcctatgtgattgctgggcgtggtggctcacatttgtgagtgaggaaccatctctacaaaagatcagaaattagccaagcgtggtggcgtgcacctgtagtcccagatattcagggggccaaggtgagaggatcgcttgagcccaggagatcaagggtgcagtgagccttgatgcagcccctgcactactccagcctaggtaacagagtgagaccctgtgtccaaaaaaaaaaaagactatgtgatcttgggcaggcaactctctctctctgagcctcaattagatcatttggaagatggaatcattatagtacctagaggatcagtgtgacacttaaatgtgacagtaggccaggcccagtggctcacacctgtaatcccagcactttgggaggcctaggtgggcagatcacctgaggtcaggagttcaagacagcctggccaacatggcgaaaccctgtctctattaaaaatacaaaattagggccgggcacggtggctcacacctgtaatcccagcactttgggaggccaggacgggcagatcacgaggtcaggagatcgagatcatcctggctaacatggtgaaaccccatctctacttaaaaaaaatacaaaaaattagccaggcgtggtggcggacacctgcagtcccagctactcgggaggctgaggcaggagaatggcgtgaacctaggaggcggagcttgccgtgagccaagatcgtgccactgcactccagcctgggtgaccgagcgagactccgtctccaaaaaaaaaaaaaaaacaaaattaggcagggcgaggtggctcacgtctataatcccagcactttgggaggccaaggcagacggatcacgaggtcaggagttcgagaccagcctcgccaacatggtgaaaccccctctctactaaaaatacaaaaactagctggacatggtggcaggtgcctgtaatcccagctactcagaaggctaaggcaggaaaattgcttgaagctggcaggcggaggttacagtgagccgagatcatgccattgcactccagcctgggtgacagagtgagactccatctcaaaaaataataataataaataaataaatgtgacagtgcactagcaaatgctttgcatcatgcctagcacatagtaagtgtagtaagtgctcagtaaattcaaaaacaaaacagtgttagcttccctggaagttacttctcccctggcagcccttactgcttactcaggtcaccaataaccctcttcagattaccaaagcagcctggcattagagaggaggcaaaaacccagcatctgaaggctgaaattgcatcccagctccaccaactaccagctgtgtggccttgggcagtcagcctctctgtactttagtttcctatgtgaaaaattgggatcagaatagtagctgcctcttaggcttgttgtgaggattaaataagagcacagaacgggcacaatacatgttcaagtcattattactgttattattattactacaactactactgctgtactttcttccacacccaccctggtaccaattcctacagattcaacctcctaaaagcctctcaaagcagtctctggcctccatttcccaggcctggcccttcctatcatttcatgcctctattaggggctccttaaaacagattgtcaggtttggtgtggtggcctgagcctgtaatcccagctgctcaggaggctgagacaggagaatggcttgaacctgggaggtggaggttgaagtgagccgagatcacgccactgcactccagcctgggcaacgcagcgaggctccatctcaaaagcaacgacaacaggtcaccagtccccaccccagagttactgattcagtggctctgcagcagcctgagaatgtgtatttttagcaagttcccaggcgatgaccatgctgtcagtccaagagtcacactttgacaacctctgcttctgagctctgcccaatttctctcatgagctctgcccaatttctctttactcatctaacccttctccaggctggtggcctcagggctggggggattctgtgggtggagatcagtcaaggatagtcagaggctgggattgtgaaaaggggttggcctctggctccaggttttgttcttcaccctggaatctgctgctttgtaccagccaaagtcagggtgctcctagggcctgaaaatcctacaccctggttacacacacacacacacgcaaacacacacactcctcccctattatttactccaaaagtcccatgcacatgcatgaccctggggtggtcccctccaagcccccctaccctgccccacgcaggccagagctcacccaccctcaggattcatcgctgacggccctgcatccctttcctcacagatgtttcacttaccctattctctgctctgaaattccctcaaaagcattcactagtaatttttctaaatcacagtaattacctcattactttgatattaatagacttcgcttggcagcaaggagccagttgaaaggtgcccaggctctgtgtgtggggagggattcctggaggcagccccacgtgagtgctggccgggctgcagccctgtgtctcaccctggcctgcttgcctccccagcctgcctgggctctcatgtgctcttccccaagtcagggaaaatctttgaaccacccacttctgagaaatggtgaaagagagaaggaaggaagaaacgaaagacacaggaaaggggccaggagcagtggctcacccctataatcccagcactttggcaggcgaaggtgggaggattgcttgagctcaggacttcgagaccaacctgggtaacacagtgaaaccctgtctctacaaaaaaatcaaaaattagctgggcctggtggtgcacacctgtagtcttagctactcaggaggctgaggtgggaggatctcttgaccccaggaggcagaggttgcagtgagccgagattgcatcactacactccacattgggtgacagtaagagaccctgtctcttttttttttttttttttgagagagagtctcactctgtcacccaggctaaagtgcagtggcaccatctcagctcactgtaaattccacctcccagattcaagtgattcttgagcctcagcctcctgagtagctgggattacaggtgcatgccactacacctggctaattattgtattttgagtagaggcacagtttcaccatgttggccaggctggtcttaaacttctgacctcgggtgatccacccacctcggcctcctaaaatgcttggattacaggcgtgagccaccgcacccagcccaagagaccctgtctcaaaaaaaaaaaaaaaggctgggcatggttgctcatacccgcatacctgtaatccctgcactttgggagactgaggcaggcagatcacttgtggtcaggagttcaaaaccaggctgaccaacatggcaaaaccctgtctctaccaaaaatacaaaagttatctgggcatggtggcaggcgtctgtaatcccagtacatgagaggctgaggcaggagaatcacttgaacccaggaggcggaggttgcagtgagccaagatcgtgccactgcactccagcctgggcaacacagagacttcatcttgaaaggaagaaggaaggaaagctgggcactatggctcatgcctgtaatcccagcactttgggaggccgaagcaggcagatcacgaggtcaggagatcgagaccatcccggctaacacggtgaaacctgtttctactaaaaatacaaaaaattagccaggtgtggtggcaagtacctgtagtcccagctacatgggaggctgaggtaggagaatcacttgaacccgggaggcggaggttacagtgacctgagatcgtgccactgcactccagcctcggcgacagagagagagagagagagaaacagagagaaagaaaggaaggaaagaaagcgagagagagagagggggagagagagagagagagagagagagaggaaggaaggaaggaaggaaggaaggaaggaaggaaggaaggaaagaaggaaggagaaaatcaaggatgatgaggtttaggacgcacgtactgagtccttactatctgccagatgccttccttgcattatctttcctcatcctcaggactgttctctatgatgaggcctcagggggctgcatttcagctggggaaattgagagcttaggtgatctgcccaaggactcactctcagtagcagatctggattaacgcaggtaggcctgactcccaagcctaacctcctaaccatgaggctcttctgcaagcatcctccactctaggcctcagtttccccattcatagcagtcagagactctgttgatgagggctcactgagagccagacaccagtttgccacctggcccattgcacttaatcctattactgcatttgaatctatgacatgttataaccacggggccatgctgccttggttttacctgctcactctcaagttgatgataagtgagtttccaagtccaagagtctccaggaacgttgcagacttcctctacaaacaggatcaggaagagaagatctcagcagaaaggcaccccggggtgggacaggccagggctgagagtgattgggcagccacagactagactagccaagctggtcagggtcagggtgggggtgcagtatagaggatcctttgtcagggcagaagctgcaagcctccccatccccaccatctggctccagctccagcccagtgatgcatgatgaggagaatgttgggggggtgttgctgagggctgcccacctgctctgcctcctgggataagccaacccgagacctcccaggcccatctggctaacacatccctaggccctgaccacccctgggactccttttgacagactgaaattggccgggagtgtggccagcctgtcagggtcacaggtcaccattaatctgccagaacaagggagggcaggcgggtgggcaagcagccggtgtgggcaaagccctggcagttcctgccgtctgctgtggtggctgtggagagaggctttcctcttctgggaggcagggagatggattagaaagaatctaggaccctaggaaaattgaagatactcacgtctcactacccagcaattccacttctaggtggggccccagtgaaactcacccctgtgcacaaggtgtcattgaagcatagcatgtgatagtgaaataccagaagaaaagtaagcgcccatcaatagggaacaggataaatataaaaactgagacaatcatattcaatgattaaggctgagaactgaggtcctctatgtcaacaagatttgactgtttcaagaaattcttacctggaaagataagactgtaaaccaataaatagcctcaccgtttgcctcaggaaactcttgcaaaccaatttttttttttttttttgcaagaagttggttcaccttggcaaatacttccctttttcagacaacactttactcttcaatgtatcaagagcttcttctcaaatggtgagcactcctaagctcttttttttttttttttttcagacagtctcactgtcacccaggctgaagtgcagtggtgcaatctcagctcactgcaacctccgcctcctgggttcaagccattctcccgtctcagcctcccaagtagctgggattacaggcgcccaccaccacgcctggctaatttttgtatttttagtagagatggggtttccccatgttggtcaggctggcctcaaactcctggccccaggtgatccacccacctcggcctcccaaagtgctgggattataggtgtgagccaccacacccggccactttttttttttaagggacagcatcttcctttgatgcccaggctggagtgcagtggcatggtcatagctccctgcagccttgaactcttggtctcaagcattcctcccacctcagcctctcaagtagctgggacttacaggtgtgtgccaccacacctggctaatgtttaaactttttgtagagatggggtctcactatgttgaccaggctcatgggatgtttttgtttttgtttttgttttactcttgttgcccaggcgggagtgcaatggaaccatctcggttcactgtaaactccacctcctgggttcaagcgattctcctgccacagcctccagagtagctgaggttacaggcatgcgccaccacccccagcaaattttttagtagaggcagggtttctccatgttggtcaggctggtcttgaactcccggcctcaggtgatccgctcacctcagccccccaaagtgctgggaatccagatatgagccactggtcccagccacaaacaaatggcataatttctttttttttctttttattttttgacacggagtttcgcttttttgcccaggctggagtgcagtgctgcgatctcggctcactgcaacctcagcctcctgggttcaagctattctcttgcctcagccaccccccgaggagctgggattacaggcatgtgccaccacacctggctaatttttgtatttttagtagagagggggtttcaccgtgttggccaggctggtctcgaactcctgacctcagataatccacccatcttggcctcccaaagtgctggaattacaggtgtgaggcaccgcgcccggccatgggctgtttttataatagccatccgatgggtgtttaaagtgggatttaaaaaaaatacgggccagatgtggctcacacctttaatcccagcacttgaggaggctgaggcagatggattacttgagctcaggagttcgagaccagcctggccaacatggcgaaaccccatctctactaaaaacacaaaaattagccaggcgtggggcaggtgcctgtaatccctgctactggagaggctgaggcaagagaatcccttgaacctgggaggcagaggttgcagtgagccaagacttcctctcaaaaaaaaaaaaaatacagatgggatgggccagtgcagtggctcacgcctgtaatcccaacactttgggaggctgaggtgagcagatcacttgaggttaggagtttgagaccagcctggccaacatggtgaaaccccgtctctactaaaaatacaaaattagctgggcatggtagcgtgcacctgtaatctcagctacttgggaggttgaggtaggagaatcgcttgaacttgggaggcacaggttggagtgagcctagatcacaccattgcactccagtctgggtgacagagcaagaccatgtctcaaaaaataaaaaaatacagatggaccacgacttacacctataatcccaacactttaggagtccgaagcaggcagatgacctgagatcaggaatttgagaccagcctgggcaacatggtgaaaccccgtctctactaaaaagacaaaaaagtagcctggcctagtggcgcatgcctataatcccagctactcagagggctgagacagtagaattgttgaaccccggaggcggaggttgcagtgaactgagatggtgcatccctacatatgtatatagggatggatgcggtggctcaaccctataattccagcactttgggagaccgaggcgggcggatcacttgaggccaggagttcaagaccaacctggccaacatggggaaaccctgtctctactaaaaatataaaacagccgggcgtggtggcaggctcctgtaatccccactacttggaaagctgaggcaggagaatcacttgaacctgggaggcagaggttgcaatgagccaagatcacaccattgcacttcaacctgggcaacagagtgagactctgtctcaaaaaaaaaaaaaaaaaaaaaaaaaaggccgggcgcagtggctcacgcctgtaatcccagcactctgggaggctgaggcagggggaacacctgaggtcacgagatcaagaccagcctggccatggtgaaacctcgtctccaataaaaatacaaaaaagtagctgggcatggtggtgcgcacctgtaatcccagctactcgggaggctgaggcaggagaatcgcttgaacctgggaggcggaggctgcagtgagctgacacagtgccattgcacttcagcctcggcaacaagagcgaaactccgtgtcaaataaaaaaaaatatatatatatgtgtatatatatatatatgtatatatccccattgtgcagaagaggaagaggaggaggctcagagggtccagggagccacccacagccacatatggcagaagtaggatctgaccttagcactgaaattcttaccctctataatttggtgccttccacggaaccttatcctgatcccaagagttcagtagagggtcctacacatcaggaagtttaagtaactcagtgatagtaataacttatatttaatgagcacttgccaagcaccaggccccttgctaagctctgaatcctcacaaccctagtgagcaggtttttgtttttgttttttttgagacagtcttgctgtcatcgaggctggggtgcagtggcacagtcacagctcctcatcctacctcagcctcccaggtagctgggactacagttgtgcaccaccacacccagctaatttttgtatttttggtacagatggggtttcaccatgttgcccaggctggtctcgaacttctgggctcaagcaatccacctgcctcggcctcccaaagtgctgacattacaggcatgaggcactgagcctggcctgagcccacatcattcggctctctgatgtggaaatagagtctcaaatgggtcaagagatttgctgaaagtcacacagtaatagcatcaatctgtttggttgcagaaccataactgtcctattcttgggtgcctcatgggggatcctcagggccatgacttccagaccatttctgagcttcatcagtggtaccttcccagtctgcagatgctatgtgaccttcatcttggtttcttgggcccccaaagcctccttccagtaccagcaagctccaaaccaaatagggtcttattgaggcaccaggagcctggctgggacccagaaagagccaagtgtcccctgccacacacaacaccaggaggcagcaagggcgatccccagcccccagactcccagcatctgtgatgctataacattccaaacagtagaattctctggctgtgaaattctaagtaatagaactcagaaggcttgaagttctaatcaatcaggaaaacttccagatgaagggaagctgctggggtgcaaaaatctcagagagcagcggggcatggtggtgcctgcctgcagtcccagctacttggaaggctgtggcaggagaatcactaggagttggaggctgctgtgagctgtaattgtgcctgtcccctgccccagttcattactcctttcagtaatcagctcagactccaggtcctcagagaggagaatgggggcctgtctgggtcttaaaatcaggcctcagggcacagttttctaaggcacggtaaagagccctgggctggaatatgtatgaataattaggattatactgtagttaaataataataatcagagaacaataataatagctggccttgagagcttatcagtgtgctaagtacacattgcctcagttaatcacttctctcgagaatgctgggaggtaagagtcatctttttccatttccaggaagtgaaaatcaagctcagagaggttagtgaacttgcccaaggtcacacaggtgccagataactggcggagcctgaagagtggagaccttatccagcggatgcttcttgggggactttgggaagtccccaaaagatttcccaaagatttatcccccaagaggataaatcctcttggagcctcagtttgcccagatgtacaaagtacatctggaaaaggcagagggaaaaaaacaggagcaaaggcagagggaaaaaacaggagcaaagaagccaggcgtaattacagcttatgcctgtaattccagcactttggcaggctgaggattgctccagcttgggagttcaagactagcctgggcaacacagcaagactccatctctacaaaaaatgttttgaaaaattggctgggcctgccggcatacgcctgcagtcccaactacttggaaggttgagatgggagggtcactggagcccaggaggctgagaatgcagtgagctgtgatcctgtcactgtactcaagcctgggcaacagagtgagattctttctcaaaaaaaaaaaaaaaagaaagaaagaaaatgaacaggagcaaagaagcatggaccaccacagtttgatggggacatgtaatcagaaaggataacctggggggaggaagctgaaagtcccaagaactttgtaagtggcgtctaattaagcccatgaggcaggaaaatagcctatagtcttaggactaacactatccatgagccaatccttaagtaagcagaatgtagaaggcttgatttcatggctgacacagagcagagtcagtggcagcttttactattattatttttttttctttttatttatttatttttttgacatacggtctcactctgtcacccaggctggagtgcagtggtgcgatctcggttcactgcaacctccacctcccaggttcaagcgattttcctgcctcagcccctgagtaactgggattacaggcacgcgcctccacgtctggctaatttttgtattcttagtagagacggggtttcaccatattggctgggctggtctcgaactcttgaccttgtgatccgcccccctcagcctcccaaagtgctgggattacaggcataaaccaccgtgctcaaccctaattttgttttttattttcatgctttttttttttttttgagacggagtcttgctctgttacccaggccaggctggagtgcagtggtgcgatctccgctcactgcgacctccgcctcctgagttcaagcaattctcctgcctcagcctcctaagtagctgggactataggcgcccaccaccacatctgcctggattttatatttttagtagagacggggtttcaccatgttagccaggatggtctcgatctcccgacctcgtgatccacccgcctcggcctcccaaagtggggattacaggcgtgagccaatatgcccggctcacacctctaatcccagcactttgggaggccgaggcgggtggatcacctgaggtcaagagttcgagaccagcctggccaacatggcaaaaccccaatctctactaaaaatacaaaaattagccaggtatggtggcaggcgcctgtaattctagctacgtgggaggctgaagcatgagaattgcttgaacctgggagtcagaggttgcagtgagccgaaattgcaccactgcacttcatcctggtcaacagagcaagacttagtctccatttcagagtcattataggcatgagccaccatgcccagctcactaatttttttttttaagagactgggtctcgggcaggcgcggtggctcatgcctgtaatcccggcactttgggaggccgaggtgggtggatcacctgaggtcaggagttcgtgaccagcttgaccaatatggtgaaatcctgtctctactaaaaatacaaaaattagccaggcatggtgacatgtgcctatagtcccatctacccaggaggctgagacaggagaactgcttgaacccaggaggcagaggttgcagtaagctgagattgtgctactgccctctagcctgggcaacagagcaaaactccttctcaaaaacaaacgaaaaagagactgggtctcattctgtcgcccaggctggagtgcagcagctactcataggcacagttatagctcattgcagcctcaaactcctagtgatcatcctgtctcagcctccgtagtagctgggactgcaggcgtgcaccaccgcgccccactgatcactgagacttttgcaccccagaagctttccttcatctagaagtttcctgatagattagaatttcaaggcttctgagttctattagttagaatttcacaaccagagaattctattgattagaattttatggcaccacagaaatattgattagcatttcatggccatagaatcctattactcagaatttcatgacttgagagtgctattgatttgaatttcatggcatcttgatgttccagcaatgcaggcgtccccagatacccacataaattgctcagatctctgctcaaactgtcgttttcccagggaggccttccctgacctccttattgcaaattgtctgtctgccacctgctttgtttttttccatgctgtttatcaccacttaacaatatgtcacatacattacttactcctcctcggctagaatgtaagaagctctaacaagacagagatttttaaatttttcttttttttttttgagacagggtctcaccctgtcacccaggctagagtgcagtggcacaaccatagctcactgcagcctccatctcctgggctcaggtgatcctcccacctcatcctcctgagtagctgggactacaggcatgcagtcactattttaaaaataattatataaaccgggcctggcactgtggctcacacctctactcccagcactttgggaggccgaggcaggtggatcacctgaggtcaagagttcaagaccagcctggccaacatggcaaaaccccaatctctactaaaaatacaaaaattagccaggtgtggtggcaggcacctgtaattctagctatgtgggaggctgaggcatgagaattgcttgaacctgggagtcagaggttgaggtgagctgagattgcaccactgcacttcatcctggtcaacagagcaagactcagtctcaaacaaacaaacaaacaaacaaacaaaaaacagtagtgactgttaagttgtctacctgccttctctagcatgctccacccccactcaatgtttcaattcatgggtggagaggggagtcactgtgcccgtctccctaaaaaataggtctcacctgagatgagatctacactcctaggacagggaaaggaattgaaatgatgcagacggatgagtccagaaagggatgtcctagcacctggaacctactcatttttcagatctcgaatgttaccatcacctgctccaggaagctctccctgacagccaggttaactttgcttccctgtcaaatgctcttcaagctccccacactctgttcacaggactctgtactgtttgcatttaattatgtatttatttgaggcaagatttctctctgtcacccaggctggagtgaagtggtgcaatctcatttcaccacagcctccacctcccaggcccaagtgatcctcccacttcagtctcttgagtagctgggaccacaggcattcaccaccatgcccagctatttttcttaccttttgtagagacagggtgccaccatgttgcccaggctggtctcaaactcttgggctcaagcaattctcccacctcagcctctcaaactgcaggaactacaagcgtgaggcaccacacgtgcccttttactgtttgtatttagagatgtgctggatgactgattgatgtctgcagacaaggaccatatctagtttgtaactcctacctagaccagtgcctggcacacagtgcatacgtgtagaatgaatgcatgaataccacatcacattcttgcaagcaggatgcaaaaagacctgctgggcataagagctgccaaggatcaggggatgccagagggaggaggaccttcggggaactgagagtttggattccagctgcccctccagagccagctcctgggtaagaggccaactagagaagggataggcagaccgtgtgcggtggttcaagcctgtaatcccagcactttgggaggctgacacgggcagatcacctgaggtcaggagctcaagaccagcctggccaacatagtgaaaccccatctgtatcaaaaattaaaaaatggggccaagcatggtgatgtgcacctgtaatcccagctactcgagaggctgaagtggagaatcacttgaagctgggaggcggaggttgtggtgagctgagatcgtgccgctgcactccagcctgggtgacagggcgagaccgtatctcaaaaaaaaaaaaaaaagagagagaaacagactaaaccatataccatactggcgctgagacctgtggctcctgatgctgtcacagcaatcagccatgcacaatttgagcaaacagacaatacataacgacacgacacgggtggctgtgtttcaacaaaactctcctaattacactaaagtttgaatttcacatatctttatcggttggggaaaagtctcccaatcccagagattaagtgttcagtttaaagtaagggtgagagcctcaggtggaagagagaccctttttttcccacccctgagatgttagacaagtcccttaactgctctgagcctggagcgcctggtttggtaaagggtctaataaaagtccttgactcccaaggcggtcgtgaggattaactgagataacaccttgagctccagccaggtgggctcagcatgagctaccggattgctattgttggtaataattattattactattaccagggggactttgagaggagcaaacggaaggacgcatgcaaatcctcttgtgcaatgtctggcaccaaggagaccttcctaacctcccctgttctgcaaacccgttcccaccctaggtcattccagacggtccaccccagcatccttcactctcccctcaaccccctcaatgctctcctcctccccacgatccctggctcagaccagaggtggtcatggcagctggccagggtgcagagagggccaggcacagagggaggagggttccaaccaggccccccgcccattgtctgagcctgccagcccgccagccagctgatgtcctgggtctccgacaccagctggccagccccacccccaccccaataccccctcctcccaggtccctccctgtcactcagcctctgcccccatccgcccacagcccagaaagactcagggtgtgaccagagggtctgagcttttgtcccccaaatcggaggctgatttgcatcttttagcaatttgcacaccccattcatttgtgtagagctagactgccacaaagccagcctggtccttggggcttatttatttgagtggggttataaaatgtgattttgggtgttccctttcagccttcagcacttcctcattctgggactttgctcagtggcttcaccactgttccttatctgtaaaacggaggcaacactttcctatacagtggttgcgaggagtaagatgtgtgtgatgtgcctggaataaagtgggtgttcaacaaacaagagctgttattatctaaacatcctccagagttaactgttaaaacctgtgctggcctggcgcagtggctcatgcttgtaatcctagcactttgggaggccgaagtgggcggatcacggggtaaggagttcgagatcagcctggccaacatagtgaaatcccgtctctactaaaaatacaaaaatttggccggtcacagtggctcacacctataatcccagcactttgggaggctgaggcaggtggatcacgaggtcaggagttcgagaccagcctggctaacatggtgaaaccccgtctctactaaaaacacaaaaaattagccggacgtggtggcgggcgcctgtaattccagctacttgggaggttgaggcaggagaatcgcttgaacctgggaggcagaggttgcagtgagctgagatcgtgccattgcactccaacctgggcagcaagagtgaaactccgtctcaaaaaaaaaaaaagaaaatcaaacaaacaaagaaaaattagccgggcatggtagcgcgagcctgtagtcccagctaatagggaggctgaggcagaagaatcgcttgaacccgggaggcggagattgtggtgagccgaaatcaagccactacactcctgcttgggcaacagagcgaaataaataaaataaaataaaaggaaaggaaacatgtgctgtccattgggtggccactaggctatttaaatttcaattaattaaaattaaataaaattggtactttagttcctcagttgcaccagccaaatttgaagtgctcgacagccatgtgcggtggctatcatactgagctgcacagatcactgcagaatgttctctgggatagtgctgattcaaaccctctaattctccagagtttttctcccttttcagaatagggctctcttctctgcagcctttcttcccctcacccccaacaaggcccatcgaggcacagtaatctgccccaccccacccccactgtatcctctgggcatagattccaaaacccccagtgggtggctgaaactgcaaatagttcctaaccctccatagtttgtacttgcaatgaccttggtgcgaaggtgttcttttgttctctgcagggcctgcacctgggatggaggctggagaacaggtgtggagctgtgccctggggcaccgaggggataggctcaattgttggtgttgtaaagcaaacaactgcacccaactctgtcccaggcgccagcagaagcctccaccttcggaggtggacgagggagggaagccctggggaattgtgggccctgtccccactatctcccagaggcagtttaagatcacataataagtctgggcctggaatgaacagtttccagcacagctgacacctggggcaggtgctccagatgggaggcccagagtgcagggggaggaaaggcttggcaacctcacaaaggccaaggctcatctgcactggaggctgtggaaggtgcgaataagtcacattcagattatttcaacctatacacattccacatccactgtggccccaacaccaccagcagagaaaagcaggagtggagaaaccccaatcctatctacaccctcatgcagacatcccaaagttaacatccccagacctgaactcctgctttcgcccttggcatgtgtttgttcatcccacagctgtcaccacctcagcctgtggctgctccatcctttcagctgctcagcccagaaccttggagtcacccttcatcctgctcttttccataccccacaaacaagccatcagcaaactccaccatctccaccttcaaacagaacacacatccaacccctactcaccatctctactgccactaccttgttccaagccatcacggtctccctccagaatcacccagtggttttccaccgttgcctcccctggcatacccttctctctagagggatgatcatgtcgctcctttgctcaaaactatctagaggctctgaaatttgtggagaacaaattcaaattcctggcagagcacagtggctcaagcctataaacccagcactttgggaagccaagatagaaggattgcttgagcccaggagctctagaccagcctgggcaacataaagagaccttgtccctacaaaaaattttagctgggtgcagtggctcatgcctgtaatcccagcactttgagaagccgaggcgggcggatcacgaggacaggagttcaagaccagcctggccaacatagtgaaaccccgtctctactaaaaatacaaaaattagctggacatgggggcatgcgcctgtagtcccagctacttgggaggctgagacaggagaatcgcttgaacccaggaggtggaggttgtggtgagcggagatcacgccactgcactccagcctgggcaacagagtgagactctgtctcaaaaaaaaaaaaaaatttaaaattagccaggtgtgtctgtggtctcagctactcaggaggttgtgatgggagggtcacttgagcccaggaggtcaaagctgcagtgagccatgatcgtgccactgcattccagcctgagtgacagagtgagacccagtctcaaataaatacattaaattaaattagaaataaaaaataaagtcagatttcttactatggcctaccaggccccacgttatctggccgcagtcccctttctcagtctctgctgtatcctgatgtcctttctgtgcagccatctttctgcctccgggcctttgttcctgctacccttactcagcctggcggctgtcttaccttctccaggttttagagtttaattaacacctccttagagaacactctctctgcttccttatataaagtagcacttggccgggtgcggtggctcacacctgtaatcccagcactttgggaggccaaggcgggcggatcacttgaggtcaggagttcgagaccagcctggccaacatggcaaaaccctgtctctactaaaaatacaaagttagccggacgtggtggcacatgcctgtaatcccagctactcgggaggctgaggcaggagaatcgcttgaacccaggaggccaaggttgcagtcagtcgaaatcgcaccactgcactccagcgtgggcaacagagcaagactctgtctcaaaaaaaaaaaaaaaaaaaaaagttgggttgcacctcttgcctttctcctgccttgtttttccttggagtacctagcatagtgtatactgactatgctcattgccagttcatggtcactgtcccctcacagaatgcctcccccgtggggtgggaatttggtctgtcttgtgcacagttgtagccctgatgctcaggacagtgcttggcacatggtatgtgtttggtgatggagggaagaatgcacaagctctgtgcttggtgccatgcacagcacctaatatggttttctcacccactacccacagcccctaagccaggtgctgttctcacagatggggaaatgccacatagagactatgatttaccccagcctagtaacagacctatccaaagtgtgtcttttgtaccactcccccatagacaatcagacttgatagccaggttgctgtttgagaccaaattctgagggcccctagggattcacatgcatcagcatgagatctgggaccttctgctctaagggtgggcagctctgaacaggtaagtctttaacattctcaaagaaggcttcaaatatctggatttctcctctcttttagcctgtctagggccatttgtttagaggaaaaatttaaaaagcaaatcacagtcctccagggcattcatgaaaccatgtatatgccttccttggcctcaggcttaaacatcccttccctggtctccaagattgcagcgtgcagccccgcccactctgcctagaggtctctctgtccctccagcctgaacaactgggacaaggggtgggacagagggaatgaaaagctctgcgggtgtggaaggtaaagaagaggtgatggggccatgctcagtagctcatgcttgtaatcccagtactttgggaggccgaagcgggtgggtcacctgaggctaggagtttgagaccagcctggccaacatggtgaaactttgcctctactaaaaatacaaaacttagctgggcgtggtggcgggcgcctgtaatcccagctactcgggaggctgaggaaggagaatcatttgaacccgggaggtggaggttgcagtgagttgagatggtgccccattgcactccagcctgggtgacaagagtggaactctgtctcaaaaaaaaaaaaaagaagaggtgagggaagtgataggctgggtccaaacaatgtaggactttgtagatcatggtgggcagtttgaattttattttaaggacattagagtcttggaggtgtcatttgtttaacttttatttatttatttatttatttatttatttgagatggagtctcgctgtgttgccaggctggagtgcagtggcccgatctcggctcactgcaacctcggcctcctgagttcaagcaatcctcccgcctcagcctcccaagtagctgggataacaagtgtgtgccaccacacttggctaattttgtattttgagtggagacagggtgtcactgcattggccaggctagtctcaagctcctgaccccaagtgatctgcctgcctcggcctcctaaagtgccgggattacaggtgtgagccaccgtggccagccttttttttttttttttttttttttttgagacagagtccactctgtcacccaggctggagtgcagtggcacaaacttggctcactgcaacatccacctcccgggttgaagcgactctcctgcctcagtctcctgagtagctgggactacaggtgcgtgccagcacgcccggctaatttttgtatttttagtagagatgaggtttcaccatgttggccagtctggtctgaactcctgatctcaagtgatctgcccaccttggcctcccaaagtgccaggattacaggtgcgagccacagcaccaggcctaggatagtttttcaaaaggcaggatgcaggctgggcaaagtggctgtaatcccaacactctgggaggccgaggcaggtagatcacttgaggtcaggagttcgagaccagccaggtcaatatggtgaaacccccatctccactaaaaatatgaaaattagctgggcgtgctggcacgtgcctgtaatcccaggctgctcaggaggctgaggcagaaaaatcacttgaacctgggaggcggaggttgcagtgagccgagatcaatgccgttgctctccagcctgggcaacagagtaagagtctgtctcaaaataaataaataaataaataaataaataaataaaaatattaaaaaaataaaaggcaggatgcagaaatgtgctaatagtatgatctcaattatgtaaataggtccatgaacagaaaaacgttgggaatactatacagtaaaatggtgacaatttctttcttttttctttttattttttgagacagagtcttgctctattgtccaggctgaagtgtagtggcataatcactgctcactgcagctggccaatggggttttgctatgttgcccaggctggtcttaaactcctggcctcatggaatcctcccaccttggcctcacaaagtgctgagattcaggcatgagccaccacctccctggcctattcctcaatgttaagaattaagataatctgtcatgagattagagttaaggaaaaaaagaattcactgttatttttgtcacaatcttcttatgtagtgtacaaattcttcaccatgactatgctcacattcctctcataagcataaacaataataaattttaatcatataaccagtagccaaagaactcgttcatctctccctctgggagttttgggctcttcagcctttttgggagaaaaagccttgcttattagaaaagccccagctgctgggcctagtggctcacacctgtaatcccagcactttgggaggccaaggcgggtagatcacctgaggtccagagttcgagaccagcctggccaacatggagaaaccccgtctctactaaaaacacaaaattagctaggtgtggtggctcatgcctgtaatcccagctactcgggacggtgaggcagggaaatcgtttgaacccgggaggcagagatgccgtgcattgcactccagcctgggcaacaagagtgaaactgtgtctcaaaaaaaaaaaagaaaagaaaagccccagccctgtcaaatatttttctggcacacaaagagattttttttaaagtgccatgggtatttcagactcctgtttacccaagaaggaccaacacctctaagtcgcttcccctcgctgactgtcatctggcctggccttgtgtttatccttcattagcggaacgggcatggccagggcagatggcaggcagcacacacttctccctaacgcccatctttatccttctcgtcactagttaaagaaaaacagtcactggacttggacaagaaagagccagggcctcaagcaatttccttaggtctatctaagtctacaaggcttccagaaggctgtgaaaagaatgtcagaattaagttctatcacctgagtaaccttcagactcaggctgaccttataatatctcttaacttccctggcgctggaaaatttagttattgcaaggttgaagtcaaattcagtttataaggcacctagccctgtcccttgacttgtaaatgttaatggtttatggctctgatgtgctccccaaaggcctatcccccaccccaaaacataaacacattccaccatgaactatgcaagaataacaaataaatagaaaaggttggtgacttgtgtcaactaacttattgtctctatatttgaaaccacacagaacttgagaaatctctatctttgaaaccaggccttgtccaggcccttagcaacaaagttttatcttcagaaacagtagaatgagaccaagtgtggtggctcacgcctataatctcagcactttgggaagccgaggcgggtggatcacttgagtttgagaccagcctggccaacatggtgaaactctgtctctactaaaaatacaaaaaattagccgtgcgtggtggcatgtgcctgtagtcccaggtattcaggaggacaaggcagaggcaggagaattgcttgaaccaaggaggggaggttgcagtgaagcaagattgtgccactgcactccaacctgggcgacagagggactccatcccccccaaaaaaagtggccaggcatggtggcttatgcctgtaatcccagcactttgggaggccatggtgggcggatcacttgaggtcgggagtttgagaccagcctggccaacatgatgaaacactgtctctactaaaaaaaaaaaaaaaagctgggcatcatggtgcacacctgtaatcccagctacttggaggctgaggtatgagaattgcttgaacctgggaggcagaggttgcagtgggccaatatcacaccactgtactccacactccagcctggtcgacaaagcgagactccatctcaaaaaaaaaacaacaagtttttgaatcaaccttgtgttccctgggtaatcctaatttgttcataatgtattatactttttatatattgttagattccatttcctaatattttctttctttctttttttttttttttttttttgagatggagtttaactcttgttgcccaggctggagtgcaatggctcgatcttggctcaccgcaacctccacctcccgggttcaagggattctcctgcctcagcctcctgagtagctgggactacaggctcgcgctaccacgcccagctaattttttttttttttttgagacaaagtctcactcttgtcccccaggctggagtgcaatggaacgatcttggctcactgcaacttctgcctctgggttcaagtgattctcctgcctcagcctcccgagtaactgggattacaggcgcctgccaccatgtccagctaattttttttgtatctttagtagagacggggtttcaccatgttggccaggctggtctccagctcctgacctcaggtgatctgcctgtctcgacctcccaaagtgctgggattacaggtgtaagccaccatgcccggccaatttttgtatttttagtagagacggggtttcaccatgttggccaggatggtctcaatctcctgacatcgtgatcctaccacctcagcctcccaagtagctaggactacagagatgcagcactatgaatggcaaatgtttgtattttttgtagagctggagttttgccatgttacccagcctggtcttgaactcctgggctcaagcaatccacctgcctaggcctcccaaaatgctgggattacaggtatgagctgccatgcttggcctaaccataaatgtaattttttttctgagacagagtcttgctctgttgcccaggctggagtgcagtgatgtgatctcggctcactgcagccttgacttctcaggttcaagtgatctttctacctcaacctactaagtagctaggaccatggtcttgtgccagcatgcctgctaacatttaaaatttagtttttgtagaaacagggtctcattatgttgcccagtctgatcttgaattcctaggtttaaggaatcctcccaccttggcctcccaaagtgctgggattacaggtgtgaaccaccgcacctggcctaatattcttaatatatataggatattcagatgatcaccttattcagtaagctttagtagttggcatctttctttttttttctttttttttttttgagacggagtctcgctctgttctccaggctggagtgcagtggcacgatcttggcttactgcaagctctgtctcccaggttcacgccattctcctgcctcagcctccggagtagctgggactacagacggccgacaccacgcctggctaattttttttgtatttttagtagagacggggtttcactgtgttagccaggatggtctcgatctcctgacctcgtgatctgcccgcctcggcctcccaaagtgctgggattacaggcgtgagccaccgtgcccggccagtagtttgtatctttcaaggaaattattgattttatctaaaatgtcaaacttgagggcataaaattcttcataatagttctttttttttttttgaaatggagtctcactctgtcacccaggctggagtgcacaatctcagctcactgcaacctccgcctcccgggttcaagcgattcttgttctttttttttttttttgagatggaattttgctgttgttgcccaggctggagtgcagtggcgcgatctcggctcaccgcaacctccaactcccaggttcaagcgattcttctgcctcagcctcctgagtagctggaattacaggcatgagtcaccacgtccggctaattttgtatttttagtagagacggggtttctccatgttggtcaggctggtctcaaactcctgaactcaggtaatccacccacctcggcctcccaaagtgctgggattacaggcgtgagccaccatgcctggcacgattctcatttttcagcctcctgagtagctgggattacaggtgcatgccaccacgcctggctaatttttgtatttttagtagagacgaggtttcatcatgctggccaggctggtctcaaattcctgacctcatcatcagcccgcctcagcctcccaaagtgctgggattacaggcgtgagccactgggcccggtctctcttacttgaatcttaaaaagtttgaaggttgggtgtggtagcgcgtgcttacaattctagcactttgagaggcccaggctggaggattgcttgagctctaggagtttaagaccagcctgggcaacacaaagagacaccacctctactactactactactactaataataataattagctggtcggggtgggtgccatggttcacgactgtaatcccagcactttgttttttttttgttgttgttgttgttgttttttctgagatggagtctcgctctgtcgcccaggatggagtgcggtggcgcgatctcagctcactgcaagctccacctcccaggttcacgccattctcctgcctcagccttccaagtagctgggactacaggcgcccgccaccacacccagctaattttttttttttgtatttttagtagggatggggtttcactgtgttagccaggatggtctcgatctcctgacctcgtgatccgccagccttggcttcccaaagtgctgggattacaggcgtgagccaccgcacccggtcaatagtaattatttttgagacagagtctcactctatcgctagactggagtgcagtggcatgatctcgacttaccataacctcagtctcctggttcaagcgattctcctgcctcagcctcccaagtagctgggattacaggtgcccgccacaatgcgagctaatttttgtatttttagtagagatggggtttcaccatgttggccaggctggtctcaaactcctgacctcaggtgatccacctgcctcagccttccaaagtgctgagattgcaggcatgagccaccgcatccggccaaattattatcactctttttttgaggcacggtcttgctctgtcacccatgctggagtgcagtggtcggatcacagctcactgcagccttgacctcctgggctcaagccaatcctcctgcctcagcctcctgagtagctgggactacaggcgtgcaccaccatgccttgctaatttttttattttttgtagaaaggaggtctcactttattgcccagtcttgaaaattattttttgataggagcattggagagattttcacaaaggaagtgaaatttcagctgggctgttaaccccatctgaattcctcatagccttttagttgtggtttagagacccttcctgggactctctgagtacattggtaccttttattgtgttttccaaaaacgttctagggagggctttcttcatcagtgctcatggcactttaaagagtatatatatacatgcatgttcttttcttttttttgagatgaagtttcgctcttgttgcccaggctgaagtgcaatggcgcaatctcggctcactgcaacctctgcctcccgggtttaagtgattctcctgcctcagcctcctgagtagctggtgttacaggcatgtgcccagcaaattgtgtatttttactagagacagggttcctccatgttggtcaggctggtctcgaactcccaacctcaggtgatctgtctgcctcagtctcccaaagtgctgggattacaggcatgagccaccatgcctggccacatatgttcttttcttctctctcttttttttttttttgttttgttttgagacagagtcttgctttgtggcccaggctggagtgcagtggcatgatcttggctcactgcaactgccacctcccaagttcaagccatcctcctgcctcagcctcctgagtagctgagactacaggcacacgccaccactcctggctaacttttgtatttttagtagagacaggttttcaccatgttggccaggctggtctcgaactcctgaccttttgtgatctgcccacttcagcctcccaaagtgctaggattacaggtgtgaaccactatacccagctggtatatgcacatatgttcttatttctacatttttttttctttttttgagacagggtctcactctgttactcacgcctgatctgttagatcaggccagagtacattggtctgatctggggtaactgaaacctctgactccctggctcatatgatcctcccaccgcagccttctgtgtagctgagactacaagcgtgtgtgcaacaccatgtctggctaatttttgtattttttgtacaggcgcggtttccccgtgttacccaggctagtcttgaactcctggactcaagcgatccacctgccttggcctcccaaagtgccgggattagaggcataaaccactgtacccggccggcctacattctgtcttttaaaatttgttttcaatacacaagtaaaatacaaatgcattctatattcttggtgtgagatatctgaaataatactgagaaacaagagtctttattcttttcttttcttttcagacggagcttccctctgttgcccaggctagagtgtagtggcgcgatttcggttcactgcaacctctgcctcccaggttcaagcgactctcctgcctcagcctcccgagtagctgggattatggacacccgccaccgcgcccagctaatttttttgttttgttttgttttgttttttgagagggagtctcgctctgtcacccaggtgggagtgcagtgtcgtgatcttggctcggtgcaacctccgcctccggggttcaagcaattctcctgtctcagcctcctgattagctgggattacaggcttgtgaaaccaagtccagctaatttttgtatttttagtacagacggggtttcaccacgttggtcaggctggtctccaaatcctgagctgtgatctgccagcttcggcgtcccaaagtgctgggattacaggggtgagccacagctcctggccttgttttgtttttttgatacggagttttgctctttttgctcaggctggagtgcaatggctccgatctcggctcactgcaacctccccctcccggattcaagtgattctcctgccccagcctcccgagtagctgggactaaaggcacgcgccaccgcaccaggctaatttttgtatttttatttatttatttttttagtagagatagggtttcaccttataggccagactggtcttcaaactcctgacctcgtgatcctcccgcctcggcctcccaaagtgctaggattacaggcttgagccactgcgcccggctctaagttttgtatttttagtagagacagcgtttcgccacattggccagactagcctcgaagttctgacctcaggtaatccaccctcctcggcctcccaaagtgttaggattataggcctgagccaccgtgcctggtctattttttatttttatttatttatttttttaatagagacgctagtctcaaactcctgagctcaagtgactctcctttggcctcccaaagtactaggattacaggcgtgggccaccacgcccggccaacagttattaaaattacgatgatgaaattttaggcatttagaatacttcaggccaaaaacactttgagccagggggctcgctcaaaggcatgcgcaaaagccatcaggcctgtacctggagaactcaggtgagacgttgccactcgttgtaatccctccccctagcactcggcccccgagcctgggccactgccctggctacaccgggaagtctggagctagaaagtgggccgtgcgcgtgacgggcgcgcgtgacgccgagggggcaggtctgagaagcaggctgcgccgggattcggcggtcggttcccgcggaaggggcgggtcaggttagggggcggtgcttaatgggagctggtcttggggccgggcttccgcgtgcgttggcctggcggcgagagcgcgcggcgggggcgtgcccggcgggcggggcggggccagccgggggcggggcggggcgcggcctaacggcggcggcggcggcggcgacggcgacagcagcggtggtggtgtctggttagctcggcggctgcagatctcgcggcgacgcctgcgagggacccgggccgcgggtcgaggcgggcggcgcctgcgagggacccgtgtcgcgggtagaggcgggcggcgcgcggcggcggcgctcggcgatggtaggcgtccctggagcggccgccttccagcgtaagtggggcgtgaatgcgggcggccgaggggggcgtgtgagggcctgcggctccgcaggcgcggtgattccgagtgccccgggcgcgaggccgggagtggaaactgaggcccgaagcggggcggcggatccaaggtcacgcagcggggcgggccttcccgggctcctgaggccaccccgtcgcttcctgcgccgcccgaagagctcggggctcacggtgtgagggaaattgtggggcccgcggcctcggaacttaggccgggccggcgtccatgggacttgccggcgggcaagaatcattttgttgtcccagcgctggggccacgaagtccggctcctggggaaatactacacccgcccgatgttgagggttggaggagatgagaatggcccctcggagggcctgtttgagcgcaggctcagtagttggctacctgggttcacatccaggcttccccatttaggtagtgaccttggctctcccggtgcctcagttcccccatctgcaaaatggggatgtggagcgggttccctccctcccccagggttcttgggttttgtgaggccagtaaaacgcttgacaccgaccgtggcacacacacaattgtgaaaactgtcattattgtaatcgtcctttattaatctgatccagtgtgcaccgcactcggaaaagtccgaaattaggctctagccgtgttaagattttgttttgttgtctgttagtcctgctccatgatctaattgttattcttacttccatttagccattccagtatttatctagtgttcctccttgatgtgtgagatccttgggggaggggtggcttctctgaataagaacaataaaattttaattgtttttcattattgtaattataatagccaacatttttttgagcaccagacattttgcattctattcacttaatatttattaaatcatatagtaagtttaaaaataccattccaggccctgggaatacaataaacaagatagaccgaactggggttttgagtttagttaggagagggagagacatagtaaatgaggaaacagataaacatgttttgcatgtttttttaattgtttaatcttgatgacatcctaagtaagacattatttgaggatgcccattttgcagaggatgaaactgagtaacagaaggtactctgagtactagtctcagagctgatgtccttaaacacgtgaaagggaggctttacgcttctttttttttgcacccattaaatgttggattgaagatagaaaaagtagatacacccagcttgcagttactgcttttgatggtttgatccattcctcatgaaatttccaactaaagaggcggatagtgattactcttttaggcttgcaaaggtacagcatctctgtaaaatgaaaggcttttttttttttgagacggaatcttgctctgtcgcccagactggagtgcaggggtgtgatcttggctcactgcaacctccgtctcctgggttcaagctattctcctgtctcagcctccggagtagctgggactacaggcatatgccaccacgctcggccaattattttattttattttattattttttttgagacggagttttgttcttgttgcccaggctggagtgcagtagtacaatatcggctcactgcaacctccccccgccccaggttcaagcgattctcctgcatcagcctccagagtagctgcgattacaggcgcctgccaccacacctgactaattttttgcatttttagtagagacggttttaccatgttggccaggctggtcgtgaactcctgaactcaggggatccatctgcctcagcctctcaaagtgctgggattagaggcatgagccactgcgcccggccttaatttttatatttttagtagagacagggtttcaccatattggtcaggctggtctcgaacccctgacctcaggtaattcacccacctcagcctcccaaagtgctgggattacgagcgtgagtcaccaagcctgaccagaaaggactttttatttgaaaaaattggggggctcttctgcctatgaagtagtcttcctttgtttctttacttccataataaacttgctttcacttaaaaaaaaaagattgtgtccaaatttcttttgtgtagtatttagtttaaaatatgcccaaaagcacaacttttgcttctgttacgtaactacatttttgttttcttttttcctttttttgagacagtctctctctgtcacccagactggagtgcagtggcgtcatcatggcccacagcagcctcaacctcctgggttcaagtgattctcctgcctcagccacttgagtagctgggactccaggcgccaccacacccagctaatttttttattttttgtagagatggggtcttgctttgttgcccatgctagtccggaagtcctgggcttgagtaatcctccttcctcagccatccaaattgctgggattaaagtcatgagccactttgcctggccttttttagtgtttctaagagaattctgtattacattcctagacagtacacttggtgtagtactcagcctcctgaggagctgggattacaggtgctcaccaccatgcctggctaatttttttttgtattttttgtagagacggggtttaaccatgttttggctgggctcctgacctcaagtgatctgcccgcctcagcctcccaaagttctgggattacaagtgtgagcctctgcacccgcccttgattgaagttttggttttttttttttttttttttttttgagacggagtttcactcttgttgctcaggctggcgtgcaatggcatgatctcggctcactgcaacctccgcctcctgggttcaagcagttctcctgcctcagcttcccaagtagctggtattacaggtgcgtgccaacacgtccggctaatttttgtatttatagtagagatggggtttcactacattggccaggctggtctcgaacgcctgaccgcaggtgatctgcccgcctcggcttcccaaaatgctgggattacaggcatgagtaactgcacctggccttgattgaagtttttaactggcatgctgggaaagagaatataggagttcagtcttaaaatcggtgcttcaacccctgagccagagtccttggggaagtagtctagaactgtggcctcacatgtttgttttttctttttttaaaactgaggtggggtcttgctctgttgcccaggttctgctgcccagtgagcatagcttctgcagcctcttatctctggggctcaagtcagcctcccacctcagcctccctagtagctgtgactacaggcatgtattgccatgcctggctaattgtttaaaaagttttgtagacatggggtttcactgtgtttctcaggctggtcttgaactgctgggctgcagcgatcctcctgcctcagcttcccggtattgggagtagaggcatgagccaccatacctggccacctaaaatgtttttagtgttcattccatcagtaaatagggttgagtatgcacacacattctatgaatgttttattttttgtttttttatggttttttttgagacgaagttttgctcttgttgccccagctggagtgcagtggtgcgatctcggctcactgcatcgtccatctcctgaattcaagtgattgtcctgcctcagcctcccaagtactgggatttcaggtgtatggcaccacccctggtaattttgtgttttcagcagtgatagggtttcaccatgttggtcaggctggtctcaaactcctgacctaaagtgatccacccgccttggcatcccaaaatgttaggattacaggcgtgagctaccgcgcctggcctgaatgtttgttttaaatggcgattatagtgtgactgtactatgtattaggcatatatatgtgtatatatatatatatatatatatatatatattttttttttttttttttttttttttgagacagagtctcgctctgttgcccaggctggagtgcagtggcacgatctcagctcactgcaagctccacctcctgggttcacgccattctcctgcctcagcctcccgagtagctgggactacaggtgcccgccgccacgcctggctaattttttgtatttttggtagaggcggggtttcaccctgttagccaggatggtctcgatctgctgacctcgtgatccgcccgcctcggcctcccaaagtgctgggattacaggcatgagccaccgcgcccggccactgtattaggtgtattgttttgttttattttgttttgagatggagttttgctcttgttgcccaggctggagtgcaatggcgatcttggctcaccacaacctccgcctcccaggttcaagcgattctcctgcctcagccttccaaatagctgggattacaggcatgcaccaccacacccagctaattttgtatttttagtggagatggggtttcaccatgttggtcaggctggtctcaaactcctgacctcaggtgatccgcccgtctcagcctcccaaagtgttgggattacaggcatgagccaccacgcctgtcctaggtatgttttataacatacaaaaatagacattttacagaaggataaggtaaaataaatggaagtagcagttccaacgttgtctttctacacccagtggtgaattttaacaatacctcctggggtggagatcattgatcttgtagtagtaccttctcaatccattaggtctattgctctgatgaaatctagtttattcggtagaagtaaaatgtaatggctgggtatggtggctcgcgcctgtaatcccaccatttggaaggtcgaggtgggcggatcatctgaggtcaggagttttgagaccagcatggccaacatggtgaaaccccatctctactaaaaatacaaaaagaagctggctgtggtagcgggggcctgtagtaccagctgaggcaggagaattgcttgaagccaggaggcagaggtggccgtgagctgagatcccaccattgcactccagcctgggcaacaagagggaaactctatctcaaaaaaaaaaaaaaaaaaaggccgggcacgatggctcatccctgtaatcccagcactttgggaggctgaggtgggcggatcacgaggtcaggagttcaagaccagcctggccaacattgtgaaaccccgtccctaccaaaaaacgtacaaaaaaaatcagctgggcgtggtggcgggttcctgtagtcccagctacttgggaggctgaggcaggagaattgcttgaaagaaactgcggaggttgcagtgtgctgagatcgtgccactgcactccagcctgggcaacacagcaagactctgtctcaaaaaaagaaaaaaatgtaatggttaagatttaaattctaaagttttgaaatttaattctggagttgtgctgaggttaaaatcctgggaaccaatcctaacaagttttgagacttcaggctcattacttaaccttcttgtgcagttcattttcctcatctgaaaaatggagataaaatttctaccccatttgcaggtttattatgatggttaatatatgttaatatatgtaaagtacttaaaaccgtgcttgacacattctgttctggtggttgttagtggctgagggtataccatctgacttagggtctcagtctaggaggggccgtgcacaagtcaacaggtaatgataaagtgttttaagtgctttaagcgtaaggcttttgggaaggcaggggagacataactaattattccttgagattccaggtaaggtccagctaaaggggtgacattaaaccaggctttaaaggagaagggaggcttttcccaggagaaggaagggtgaagtctactggctgaaggtagttgagggcttggtgagtagtttatcagatctggacctacagggaacctgattgaagcttatataccttgttaatagtgaattctggctggagttgttcctggcaggggccagatggcaaagaagcctgttacagaacttttcacaccaccacagccctttccttctctctctggcacatacctcattctgccttcttagttatctaagaatataagcttctaaattataaactccttgagggttttgacaatgtttgcatttttgtaattttattttgcctagcaaggtaagtaggaagttcattagtgtcgagaaaggtatataatcattggaccttcaaggaagtctaaacagttaaaagtggaatggtaaatgaccatatttactagtgaaaaacttggttacaaatgttttgtagtagataggacctgtgcattactatttaaaaggggtaagaatgatcatcttcagtatccctttccttatctggcacttatccattgggattacagaagagatcggaaagtgcatcagaaaggcttgtctgacgttgaataggtaccttttgtttgctcttctaggtctgctttccatcctttttcaccctatcctgtgccctgggaagctgacttacctatatggactacatcaatgagcttccttcccctttgaggttatgaaatttattttcctactcccgtctcatgggttgtgcccttagctgactctgtcccttgactgaaggtcactgcttctctaaatgtggtcctctcggccgggtgcggtggctcatgcctgtaatcccagtactttgggaggctgaggccggcagatcacctgaggtcgggagtttgagaccagcctgaccaaaatggagaaaccatgtctctactaaaaatacaaaattagctgggcatggtggtgcatgcctgtagttccagctactcaggaggctgaggcaggagaattgcttgaacccgggaggcggaggttatggtgagcagagatcacgccattgcactccagcctgggtgacaagagcgaaaccctgtctccaaaaaaaaaaaaaaaaaaaaaaaagaatgtggtcctttctgtgtgacatcctccatgtaggtttggaaagtttttgttccctttggttgttgggcctagagatctagagatgctctcattagtcccagggtattacagctatcccttgtgcctatcttgtaccctgctcacatatttctttctagttccattattaaaccctccttgaattaaccttactggagtatgccatgtttcctgctgggaccatgactgtgtttgaagcttgtatactttttttttttttttttttttgagaaggggtctcactctgtcgctaggctacagtgcggtagtgtgatctgggctcactacaatctctgcctcccgggttccagcgattctcctgcctccgcctcccgagtagcagggactacaggcacacgccaccacgcccagctaatttttgtatttttagtagagatggggtttcaccatgttggccaggctagtctcgatcacttgacctcgtgatctgcccgccttggcctcccaaagtgctgggattacaggcgtgagccaccacacccagcttatttttattttttttatagagacaggatgtttctatgtttcccatgctggtctctaattactgggttccaatgattctcctgccttggactcccaaaatgctaggattgcagatgtgagccattgagtccagcccttctttgacttttgagtaagtttatcctagtttggaaccagttagttttctttttatcttactgtatttttaaaatttttgtttgttaattttgaaaccaggttatgagaccaacttttgtatttttggtagagacagggtttcttcatgttgcccaggctggtctagaactcctaggctcaagtgatccacctgccttggcctcccaacgtgctggcattaacaggcatgaaccactgtgcctggcccagttaattttctttcttttttttttttttttgagatggagtttcccttttgttgcccaggctggagtgcagtggcactggagtgcagttgctcactgcaacctccgcctcccagggtcaagccattgtcctgcctcagcttcccaagtcgctgggtttacaggcatgcgccaccacacctggctaatttttgtatttttagtggagatgggggtttcatcatgttggccaggctggtctcgaactcctgacctcaggtcatctgcccacctcggcctcccaaagtgctgggattataggcgtgagctaccgcgcccaacctgacctagttttcttatatacagaatcaaaaaatcagcagagaggttgggcgtgatggtggtgccactcagctgtagtcccagttactcggaaggctgaggtaggaggatcgcttgagcccaggtgttggaagctgcagtgatagtgccactgcactccagcctgggtgacagagagaccctgtctcaaaataataaaaaataataatggccaggcacagtggctcatacctgtaaccccagcactttgggaggccgaggcgggcggatcacctgaggtcaggagttcgagaccagcctggccaacatggcaaaaccccgtctcttctaaaaatacaaaaattagccaggtatggtggtgggtgcctatcatctcagctactcaggaggctgaggcaggagaattgcttgaacccagggggcggaaggttgcagtgagctgagatcacgctgcttcattccagcctgggcgaaagagtgaaactccgtctaaaaagaaaaaaaaaaaaaataagcagagagattgagtttaagcttgttctcaagtgttaaatgttgtataggttatgtgaatccagagttttaggcaggaagaatggtttaaatgatagtgcttaatgaatgattgcagccctgggatcaaaatgagttaattcactaagttcagggtaatgaaaataggaggaagaggtggggaagtaagatttctcacctgccaattttgttctcattccttagagtattgttttgaatctcatagaaagtgaccattcttttgtaaagatttacttcaaatccctgaaagcttggaggctaatgaagaagaatcactctggttattgtttaggctttagtaagattaccaaggaagggatctcataatgctgtagtaatagtttacatgtgcgacatgagctagtgtttgtacatgtgacagaccttgtttctggattttattaaggctggttaagtagctttttgcctctgtctctggtttctgtctctggccccttgaggctatctgaaattttaggagttggggtaccataacttgaacttttgaaatgagtcaataagcagatacgtcagccgagtatgactttaagtctagttgaattcttttaagaaaaagtcttggctagattttctgctgggcattttttatgtacatcaatcatctcatttaattatagatcaaacttgggagagagtatctctgttttactgataaggaaatcctgggcgacagagtgagactccatctcagaaaaaagaaaaaaagaaatgagttagagaatttaattgtccaaggtcacacagttaataagtagtagattcactcttcctaactagtttaatcttggtgtcaagttcattcattatgcattgagtgtccaaacacccatttattttttattttttattttttttaaagacagtctctgtcgctcaggctgagtgcagtggtgtgatcttggctcactgcaacctccaccaccgaggttcaagcagttctgtgcctcagcctcctgagcaactgggactacaggcgcccgtcaccacacccggctaatttttgtatttttagtaaagacggggtttcaccatcttggccaggctggtcttgaactcctgacttgtgatctgcccgcctctgcctcccaaagtggtgggattatagacgtgagccactgcgcccagccaaaaacccacttttttttaaccctctatcgcatggcttctttttgctagactaggggtttttagacatgtgttctacaggagcccagagcttcctgaagataattgatttcccataatctttcttcaactttctttccctaacaactcttcttatttaaaaaaaaaagtccaggccaggcgcggtggctcacgtctgtaattcaagcactttggggaggctgaggctgatggatcagctgaggttgggagctcaagaccagcctgaccaacatggagaaaccccgtctctaataaaaatacaaaattattcagccatggtggcgcatgcctgtaatcacagctacttgggaggctgaggtgggagaatcacttgaacctgggaggcagaggttgtagtgagccaagatcctgccactacactccagcctgggcgacagagcaagactctgtctcaaaaaaataaataaaaatttaaaaatttaaaaaagtccaaataattggggtatgatttaaagatagctatatgagaccttgttcaggggtatcctaagttggccttagagatgaattaaaaaaataaaaaggcaacagaaactgtcagcagtctttaacaattcatcccatatgtttcctgatcttagcagtgaagcagatgatggcagtgaacatcaaaagcccaagaaatgtccatgctaattttgcatggctctatgaggagctgtcaaatatggatcatcaaatatagtatatagactatgcaatgaagctttactttgcaatgtggctctttaagatttgattttacccttctattttgtgttgtaattaaatgcagaaatcaaagtataaattcagaataacccagagcttggtatccttctgtctgaatttatagctttggagttggctagacctttcagtcaaattagctgatggtgacaaatatgtaatgtgacctctgtagcagctccagtgaaatgttaatatcaggcatagcacagctcccttgatacactattttggccttttcctctcttacaaatgtttcccttatttctttgttaatttagccatctccatgcagaggtcgtgcctgcttttaatttttcgaagccacatgagaacagacatttaaacaacacagatttattcattttggccttgtatccctagagctacactaactttatgtctgggactaaaggtggaagtagctgagattagggaaatgcagaatggtgagggagaagtgccgggagaggtgatggttttagctcctgcattccccagccaattgctgaaattcagctccccattaattttcccttgataagttggtctggctaagtagttgaaactatattcttagccttccttttttttttttttttttttttttttttgagagggagtctcactttgtcgccaggctggagtgcagtggtgcgatctcggctcactgcaacctccgactccctggttcaagtgattctcctgctgcagcctcctgagtacctgggattacaggcacatgccaccacacccagctaatttttgtatttttagtagagacagggtttcaccatgttggcctggatggtctggatctcctgacctcaggtgattcgcctgagtcagcgtcacaaagtgctgggattacaggcatgagccactgcgcctggcctaattacaaaatttacttaattttttattttgtagagatgaggtctcactttgttgcccaggctgatctcaaactcctgggctcaagttattctcccacctcaagctccgaaagtactgggatcacaggcgcaagccaccttatgtggcactagccgggattatagacaagcgtcagctaatttttgttgttgtttctgtcagtccttccttgcttattagttaatattcttctgcagagcattttcttatctttgtgtatatatattaatatggatttatggattcttattttaatactctgttactgtcattatttgttgtgttcacattgttccagatttggccagggagatccccttcaagctggcttttgtgtcattttgacacattcccacattttttaactgctttttttgacacaccaaaaaggtgttgtaggcttagtttctgctcttcattttttttttcttttttttcgtgtgtgtgacggagtctcgctctgtcgcccaggctggagtgcagtggcccgatctcggctcactgcaagctccgcctcccgggttcacgccattctgcctcagccttccgagtagctgggaccacaggcgcccgccaacacacccggctaattttttgtatttttagtagagacggggtttcaccgtgttagccaggatggtctggatctcctgaccttgtgatctgcctgcctcgacctcccaaagtgctgggattacaggcgtgagccaccgtgcccggcctagtttctgctcttcttaccctcttcttggaatcggccatttctccaaactgtttctctcctaattcctttcagtggagaaaattatttagaaatcaagatttggaggccgggcgcggtggctcacgcctgtaatcccagcactttgggaggccgaggggggcggatcacgaggtcaggagatcgagaccatcctggctaacacggcgaaaccccatctctactaaaaaatacagaaaattagccgggcttggtggcgggcatctgtagtcccagctactccggaggctgaggcaggagaatggcgtgaacccgggaggcggagcttgcagtgagctgagatcgcgccactgcgctccagcttgggtgacagagcgagactctgtctcaaaaaaaaaaaaaaaaaaaaaaaaagatttggatgctgtgtgtgctcattcctattggaatattgttttttagaacttcttaatggacagagctaggaaatatatacacacacatacatatacacatatcaaaaaatatgtatctaaatttctttctttctttcttttttttttttttttttgagatggagtctcgcccagtcgcccaggctggaatgcagtggcgcaatctcagctcactgcaacctctgcctcccgggttcaagcgattctcctgcctcagcctcccgactagctgggattacaggcgcccgccatcaggcccagctaatttttgtatttttagtagagacggggtttcaccatgttgaccaggctggtatcgaactcctgacctcgtgatccgcccgcctcggcctcccaaagtgctgggattgcaggcgtgagccaccgcacctggccattttgtgtgtatttttaggaaaaaaattattgtataaaactagatagcagtgaaatatattcattttgtatggtttatttatttatctttttttcttggtgcttctgtcttggcagagtctcagaataacttgaaatctttttaaattttttgtgacagggtcttactatgttgccccggctggcctcgaactcctggcccaagcgaatctcctgcctcgatctcgcaaagtactgggattcaggcatatgccactatgcgtggccaagatgtaatttatatacaatcaaatttactttttttttttttgtcagtgggtagagaaaaaaacttgctctttttcatggcatagttctattagttttgtattattagtatgcagttgtaatcatcaaaccagatagagataattttcattcttcctgtaagttttctcacacccctttcttttcacctcgctcttggaagctactagtttatactggtttttgtcactcacagttttatgggggtttttgtttgcttgtttctctactttttcttttctataatgtcatatacatggaatcatacagtatgtaacctttgtgtctgatgtgtttcacttaccataatgcttttgagattcatccacgttgtgtcatgtatctataggttgttcctttttattgttgagtaacatgttatgttcaccagctgatggacatttgaactgtttcccattttgatgattatgaataaagctttaaatattcatatacggttctgcatgtggacatatgtttttctctctcttggataaatacctaggcatgggattgctgggttctatgataatttcatatttaactttttttttttttttttttttttaagatggagtcttgctctgtcacttaggctggaatgcagtggcatggctcacggcagcctccgcctcctgagtttaagcaaattctcctgcctcagtctgccgagtagctgggattacaggtgtgcaccgccacgcttggctaatttttgtatttttagtagagatggggtttcaccatgttggccagactgtctcgaaatcctgacctcaggtgatccacccaccttggcctccaaaagtgctgggattaaaggtgtgagccaccacgcccggcctatacttaacttttttggaaactgccaaaatgttttccaaaatggctataccataccattttgcatttccactactaatgtatgacagtttcacttgcttgttggtatttttgttttgttttgttttagaattaattgttaaggaagcactatatctgggtgaaatcaattttggtcatctcatttctacaatgaaaggaatactctctgttacttgttttagaatgtagggtcccttgctatttatattcttttggggttagtgcagttcttatttacacatcatttgcagaaataatggtaactaccatttgtgtatcagaacaattttcacatatctaatttttatagcaattaaggtaggtagaagtgtcttcatcctcttaacttgtataaggagattggttcgggtaatcaggtgatttactcactgtcacacggctagaatgtgagagtgtggctttttggatttggagctgtgaggggacattctgtctctcttttaagtagaggtgtaatagaggaagatatgggtgtcatcccagtcctttcttttacctcaaattcataagcagtgcagtcttgaacaattcatatttgaattttgagttaatttcatcttttcacctgtctacctgaaaaggtgagaatcagttgagggactgttaaaggatgttttgaacactgtatgttacctcatgattaattttatagtactctccatttgtagtggtttccatagttgtttatgggaacaagtttgcagaaaaaaaatggttgaatagaaatagaaggggtcggccgggtgcagtggctcacgcctgtaatcccagcacttagggaggccgaggcgggtgaatcactggaggtcaggagttcgagaccagcctcaacatggagaaacccccatctctgctgaaaatacaaaattagccaggcgtggtggtgcatgcctgtaatcccagctgctcaggaggctgaggcaggagaattacttgaacctgggaggcggaggttgcagtgagccgagatcgcgccattgcactccagcctgggcaacaagagcgaaactcttgtttcaaaaaaaaaaagaaagaaatggaaggggtcaggtgtggtggcttaggcttgtaatcctaacactttgggaggctgaggcacatggatcacttgatatcaggagttcaagaccagcctggccagcatggggaaaccctgtctctactataagtatgaaaattagccagactggtggcgcacgcctgtaatcctagctattagggaggctgaggcaggagaattgcttgaacccagaaggtggaagttgcagtgagctgaaatcgtgccactgcactccaacctaggggacagagtaagactgtctcaaaaaaaataaaaataaaaaaagaaaagaaatagaaggggctgggtatggtggctcaagcctataatcccagcattttgagaggccacagtgggaaaattgcttgagtccaggagtttgagaccacactgggccaacacagaccctgtctctacaagataataataatagtcataataatataaattaatacaaaaaagaagagaagcaatttaatacaagagctgaatagcaaaatggccagtactactacaatacacacagagacacaggtcccctcttttttcatatttactttgttttatgtaatacataaatacattgaaaaaaattaatacagataaaataaaaatccacttcctacactaagtgaaaccattaacaactgtattatggagctgttagatgcagggattgcgctaagtgccatagggctgccaaggtaggtaagattcggtcccggtcctcagtgattttctagttttccttctgtgccctaacagtttttggatagctcttgtaataaaaacttttaaacagatgttttaagtttagatagtgattaaccatcttttcctcttgtaattgatgccatcgagtgagagttctgttgggaaatagtgaaacaaggattctggttcaatcaatggaggcagggaatttcggaggaaggagatgggatgccatccatgccccagagccactgagcacttagctgcagctgtggagagcaacacttggctagctatgagttttctgtaggtctctaaatagttcatgctaattttgtggatgttggactctgaggaatggtgtgttcaatggggagaatgtccaaaaaaactgtaactggtaagtagccatttggaatactgaaatcaatttctgattatgtgaatgtcccttttttgtaaattattttagcttacttgccagttcagtttcttggtgttaccctgttagttaaattcaatatgtcatttatttaagggcctgatatttgtattctattagaaggacaaacagctaattatactagaaggtggactataatgaattgtcattacagtgactaaaagttattgattttctaggatattcttgatttcagatatttactttgacaaacgtttattgaattccttgtatcagatcctgggggatataaagagttctgaggtcctggaggactatgtagtccagtaagggagattgatagcttcagtaccaaatgctaagcagtgttaatggcaagtaacatcctaccaaggatgggcatctgacctaatgtgtaagtatgcatgtgtgagtgtgtttcaaaaaaggcttcttagagaaaatgatatctgttttgagccaatctgtttttccttacaacataaaaaaataatttttggactggctatgtatttagctaatttaacatttgaaacgaacaaagaatacttattgaagtttctctcacctctgcaccagccagtcttttccccttcctggaagcagctagcattaccatttttttctggaccctttcgatacattcctgtaggccatataatgtcggtaggtaaagaacttcctcattttgcattgtatttcattgtatgactgcaccatactttttcccccctactgctgatggacatttacctttcaatcctttgctgttgcaaacaatgctgcataaccttgtagcaattgtcttttcatagatctgtagagtaaattcctagaagtagaactgctggggttaaggggtttgcctgtttgtgtaattttgatagatgttgccagaataccctctggagaggtatatcagcttttatactcctaccagcaaagcatgacccaagtgaagaatgggtaggagatgggtgaagttgaggctgggtcaggtttatgagtgtgagggggactgaaagtagttatgtattattgaagtgtgaagtgctgggtaaagaatagcaggagatgagagtaggaagcagacgggtcaggtccctttgcctttgtgctgtttttgtttgtttgatagcctcttactctggcccaggctagagtgcagtggcgcaatctcagcccactgcaacctccgcctcccgggtttaagtgattctcctgcctcagcctcccaagtagctggtattacaggtgtgcgccaccacacctggctaatttttgtgtttttggtagagatggagtttcaccatgttgctcaggctggtgtcaaactcctgggctcaagtgatctgcctaccccggcctgccaaagtgctgggagaacaggtgtgagctactgcaccccgcctgcctttgtttttatgcttgtatttttttgtttgtttgtttttttagcttttaagttgagggctacatgtgcagatttgttacataggtaaacttgtgtcatgggcgtttgttgtacagattacttcctcacccaggtattagcctagtacctgttatttttcctgatcctctccctcctcccaccctccactttcccataggctccagtgtgttttgttcccctcttatatgtctatgtgttctcatcatttagctcccacttgtaagtgaaaacatgcggtatttgcttttcttttcccatgttagtttgctaaggataatggcttccagttccatccatgtccctgctgcaaaggacatgatcttcttttttatggctgcatttataagacaagaggggtttatttaaacttctgctatcagaagtaggaaattgggatcccattagggcttaacttaattggtttgatttcagctttttagcttggaggctgctgaagagttaatttattgtatgagagtttggccgtgtgtggagcacaaacttacttgttttaaagaaaggatttctttgtacatttattcatttgccagatcagtcgtttacatgtgaaccctcttcacagttagttatagggaaaacaagcagataattcatgccagttaaatattacaatatgtcagacttggctgggtgtggtggctcacacctgtaatcccagcactttggaaggctgaggtgggcagatcatctgatgtcaggagtttgagaccagcctggccaacatggtgaaatcccttatttactaaaattacaaaaattatctgggtgtggtggcacacacctgtagtcctagctacttgggaggctgaggtaggagaaacacttgaactctggaggtggaggttgcaatgagtcaagattgcaccactgcactccagcctaggcgacacagcgagactccctctcaaaaaataaaaaataaaaagaacacgacacactgattcagatcccaagattaagggggaaaacaaggcttcagattttattaaacttatcctaaataatgatgtttttaaaaggaaacctttggggaaataatctgtcggtaacagatgtctaaatttttccttatttgaaaaggtcctggctgggcacggtggctcacacctgtaatcccagcaatttgggaggccgaggtgggtggatcatttgaggtcaggagtttgagaccagcctggcccaatgtgatgaaacctcgtctctaccaaaaatacaaaaattagctgagcatagtggtgggctcctgtaatcccagctacttgggaggctagggcaagagaatctcttgaacgtgggaggcggagcttgcagtgaactgagatcacaacactgcagtccagcctgggagatagagtaaaactctttttttttttttttaaatacaagttctagggtacatgtgcacaatgtgcagttttgttacataggtatacatgtgccatgttggtttgctgcacccattaactcgtcatttacattaggtatttctcctaatgctatcctgccccctgccccccaccccaccacaggcctcggggtgtgatgttgcctgccctgtgtccaagtgttctcattgttcaattcccacctgtgagtgagaacatgcggtgtttggttttctgtccttgtgatagtttgctcagaatgatggtttccagctgcgtccatgtccctgcaaaggacatgaactcattgttttttatggctgcatagtattccatggtgtatatgtgccactttttctttttttcttgtttttttttttttggagacagagtctcgctctgtcgcccagactggagtgcagtggcgctatcttggctcactgcaagctccacctcccgggttcatgccattctcctgcctcagcctcccgagtagctgggactacaggtgccctccaccacgcccggctaattttttttgtatttttagtagagacggggtttcagttgttagccaggatggtctcaatctgctgacctcgtgatccgcccgcctcggcctctggaagtgctgggattacaggcgtgagccaccacgcccggccacattttcttaatctagtctatcattgatggacatttgggttggttccgagtctttgctattgtgaatagtgccgcaataaacatacttgtgcatatgtctttatagtagcatgatttatgatcctttgggtatatgcccagtaatgggatcgctgggtcaaatggtatttctagttctagatccttgaggaatcaccacactgtcttccacaatggttgaactagtttacactcccacccacagtgtaaaagcattcctatttctccacatcctctccagcatctgttgtttactgaccttttaatgatcgctattctaactggtgtgagatggtatctcattgtggttttgttttgcatttctctgatgaccagtgttgatgagcattttttatgtgtctgttggctgcataaatgtcttcttttgagaagtgtctgttcatatccttcacccacgttttgatggggttgtttgtttttttcttgtaaatttgtttaagttctttgtagattctggatattaaccctttgtcagatggatagattgcaaaaattttctcccattctgtaggttgcctgttcactctgatggtagtttcttttgctgtgcagaagctctttagtttaattagatcccatttgtcaattttggcttttgttgccattgcttttggtgttttagtcatgaagtccttgcccatacctgtgtcctgaatggtattgcctaggttttcttctagggtttttatggttttacgtctaatatttaagtagttagtccatcttgaattaatttttgtataaggtgtaagaaagggatccggtttcagttttctacatatggctagccggttttcccagcaccatttattaaatagggaatcctttccgcatttcttgtttttgtcgggtttgtcaaagatcagatggttgtagatgtgtggttttatttctgaggcctctgttctgttccattagtttatatatctgttttggtaccagtaccatgctatttgagcaaaactcttaaaaaaatggtttatgtaaagagaaaagtaacagaaaaaaggctgtcttccaaaaggattacaggtgtgagccatcatgcctggccataaactttttattaaatagacaaaatgcataaatcataaatgtacagctcagtgaattttcacaaagtgatcatacctgtgtagctactatgtagatcaagaaataaagcattagggcatggtggtgcatgcctgtagtcccagctactcaggaggctgaggcaggaagatcacttgagcccaggagttctgaggatgcagtgagccatgatcatgccactgcactccagcttgggctacagagcaagaccctgtctcaagaagaagaaggctgggcacagtggcttacgcctgtaatcccagcactttggaaggccaaggcagggagatcacttgaggtcaggagtttgagaccagccaggccaacatgtgaaaccctgcctctactaaaaatacaaagattagctgggcgtggtggcatgcgcctgtaggcccagctacgtgggaggctgaggtaggagaatcgcttgaacccgggagggggaggttgcagtgagctgagatctacgccactgcactccaggccagcgacagagcgagactctgtcttcaaaaaacaaaaattagccgggcatggcggtgtgcaggcggtgtgcacctgttaatcccagcctctcgggaggctgaggcaggagaaccacttgaacctgggaggcaaatgttgcagtgaaccaagatggggctactgcactccagcctgggcgacagagcgagactccctctcaacaaaaaaaaagtaaaagaaaacattaacagcaaccacttcagaagcctaccttcttacttgccagtcactgtccctccttctccaaggggtaaccactatcctgacctctatcaccattcattagttttgctttattctttttgaactttatataaagagtcatataatgtgcattcttccatatctggcttcttttgctcaacagtaatgatacatgatcttgtgttagtaataatagtccattctcaaatttctgtctagggttttgccacagtaatataccacagtcggtccattctgctgttgaggtatattctgattgtttctagttttggactattaggaataacgctgcagggaacattcttctgtgtatgtgggtgcacgtatgtatgtctttttttttttttttttggagacggagtctcaactgtgttgcccaggctggagtgcagtggcgcgatctcgggctgactgcaagctccgcctcctgggttcaagcctttttcctgcctcagcctcccaagtagttgggactacaggctcctgccaccaagcccagctaattttttgtatttttagtagagacagggtttcactgcattagccaggatggtctcgatctcctgaccttgtgatccacccaccttggcctcccaaagtgctgggattacaggcgtgagccaccgcacccggccacgtatgtatgtctttttgttgggtgtatgcctaggaatgggattggagggacatacagtgtgcatatgttcagctttagtagatgctgctgctgtcaaagttttccagagttgttctatcagccaatgcttgcatcagcagtctgtgagagttccatttattacacatcctctccagactaacaacttgctgttgttaatgtttaacctttttgaagagcctctgctttgtgagataggtagagggcatacagtcgtgaagaaaacagtgctgctttcatagaccgtaatgggtttttttgttttttttttggtttttttttttgagatagagtctcactcttgtctcccaggctggagtgcagtggcacagtatcagctcactgcaaccttcacctctcaggttcaagcgattctcctgcctcagcctcccaattacagctgggattacaggtgcccaccatcacgcccagctaatttttgtattttttagtagagacggggtttcaccatgttggccaggcaggtctcgaactcttgaccttgtgatccgcctgcgttggcctcccaaagtgctgggattacaggcgtgagccaccgcacctggccagattagctggggcatggtggcaggtgcctgtaatcccagctacttgggaggctgaggcaggagaatcgcttgaacccgggaggaagagattgcagtgagccaagattgcgcaactgcgctactggccgggtgacagagtaagactctgtcccaggaaaaaaaaaaaaaaaaaaaagaatgttgtacctgtttaatatatttaggtgttgataagtacttgctgttttttgttttgtgtttttttttgttgttgttgttgttttgagagggggtcttttgcccaggctggagtgcagtggtgcgatctcggctcactgcagcctctgcctcctgggttccagcaattctcctacctcagcctcccaagtagctgggattgcaggcaccggccaccatgcctggctactttttttgtatttttagtagagacaggattttaccatgttggtcaggcgggcctcgaactcctgacctcaggtgatccacctgctttggcctcccaaagtgctaagattacaggcgtgagccaccgtgccctgcctttgttttttttttttttttttttttttttgagatagagtcttactctgtcacccaggctggagtgcagtggtgcgatctcggctcgctacaacctccacctcttgggttcaaacgattctcctgcctttgcctccccagtaactgggatgacaggtgtgtgctaccacaccgagctaatttttgtatttttagtagagacggggtttcaccatgtctggagaggagcagtccaggcaaaggtaatagcgggtgttgaggccctgaggtaggaacatgcttgatatgtttaaagagcaccaaggaggctagcatggctggagcaggggatggagcgaaaagctgatgtcagggaggtagatgggggccagagcacacagcgcatttggggtcatggtaaggattttggatttgctgaatgaaatcagttttgagcaggagggtgacattatcccctttaccttttaaagagattgcttttatttatttatttattttattattattatttttaaagacaaagtcttgctctgtcctataggctggagtgcgatggtggggtcttgctcactgcaacctccgcctcctaggttcaagtgattctcctgcctcggcctcccgagtagctgggactactggtgcctgccatcacacctggctgattttttaattattagagatggggtttcactgtgttggccaggctgttcttgaactcctaaccttgtgatccgcccgccttggcctcccaaagtgctgggattacaggcgtgagccactgcactgggtctaagagattgcttttagagaaaacacctagtgaatcaagggaggaggtaggaatgtgaattaagaagttactgttggccgggcttggtggctcacgcctgtaatcacagcactttgggaggccgaagcgggtggatcacctgaggtcaggagtttgagactagcctagcaaaaacatggtgaaatcctgtctctactaaaaatagaaaaattcactgggtgtggtggcaggcgcctgtagtcccagctacttgggaggctgaggcaggagaattgcttgaaacctggaggtggaggttgcagtgagccaagatcgtgtcactgcactccagcctgggtgacaaagcaagactccatctcaaaaaaaaaaaaaaaaaaaaagtgtggcactgcacaccagcctgggtgacggaaaacgtgtccttggccaaatagtggtatcctgctcaatgagggataatgttatttatgctataatatctacctattatttattctgtagtgttctgcattgacactatagttttttatttttatttttttattgagatggagtctcactctgtcatccagcgaggctgaggtgggtgggtcagagacctcaagtttgagaccagcctgacaaacatggcgaaaccctgtctctactaaaaatacaaaattagtcgggcatggtggcgtatacctgtaatcccagctaattgggaggctgagacaagagaatcacttgaactcgggaggcagaggttgcagtgagccgagattgtgccattacactccatcctgggccacaagagggagactccatctcaaaaaaaaaaaaaaaaaaaacggggcggggggaatatcttataattactttcctaaagatagctttcaaaaattacagtgtcgagaaggctcatacctgtaatcccagccctttgggaggacaacacagaagaatagtttgagaccatcctgagcaaaatagcaagaatgcatctctacaaaacataagaaaaattagccagtagcacacctgtaatcccagttactcaggaggctgaggcaggaggaggctaagcccaggaggttgaggctggagtgacctgtgatcatgtcactgcactgtgcctgagagacagagcaagacccggcctcaaaaatgtaaaaataaattcaaaaaatgaacaataatttaaaaactacagcgtcagacgggcatggtggctcacacttgtagtcccagcactttgggagtccgaggcgggcagatcacctgagatcaggagttcgagaccagtctggccaacatagtgaaaccccatctctactaaaaatataaaaattagctgggtgtggtggtgcatgcctgtaattccagctactcaggaggctgaggcaggagaatcccttgaacctagcaggcagaggttacagtgagctgagagcgtgccactgcactccagcctgagcaacagagtgagactccatcttaaaatataaaaataaaaaactatagccaggtgcagtggctcacgcctataatcctagacttcgggaggccgaggtgggcagatcacaaggtccagagttcgagaccagcctgaccaacatggtgaaaccctgtgctgggattacaggtgtgaaccaccatgcccagccaagacattctttaaaaatgcctagcaaatatagtaaaaagtaaaaattctctttcacctcatcgctgaaagtttctgtatattttcaggctttttggtatacctttatacacatctgtaatactcacgcagtgttttttctaaatggaatgatactgtacataatactttgcagtttttataatttacagtcagatgggaaggacacaaaactattctagaagatctttgctttaaacagtagtgaagacatttatctcttctgttgttttaagtgccttggaacagattttatgaacaacagcaacattcgatattgatttgctcagtgttagtagtgagatgcctttagtagtgagatcacacctttcagagaactttctaaatgctctgtaaataaaagcagatatgtgatggactgcttcatgatgttgccaagcaccattcacatccttttccctttctcagaaagtgcagagtcatccattttggagcagttagttcttgcagatctaccaattacctgtggttataggagatgatgtttctctatctgcctgaaagtggaaaaaggaattaatgaacctgtgaagttcagttctgtaactagacagagctgtgctggaaatgaaaataagtcctttctgttattcatgacatatgggaagaaaagcttcaggtagatcaagctctgcaggcctaaatccacagaagccttgccaattttcagctcattattgccatcaaggtattttggtgattatttccactattgtaaactaattcataggactggtttttttggtttttttggtgtttttttttttttttgagacagagtctcgctctgttgtccagactaaagtgcagtggtgtgatcttggctcactgcaatctccggctcaatcactcaagtgattcttgtgcctcagcctcttgagtagctgggactgtaggtgaatgtcaccatgcacagcttttttgtatttttagtagagataaggtttggtttggttagtagagcctaggttggctaggctgctatattttgcctttttttttttttttgaagacggagacttgcttgcaacctccgcctcccggttcaagcaattctcctgactcagcctcccgagtagcttgttctacaggtgtgtgccaccatacctggccaattttttgtatttctagtagagatggagtttcactgtgtgggccaggttggtctcaaactcctgaccttgtgatccacccgcctcggcctcctaaagtgctaggattacaggcgtgagccaccgtgcccagcttacattttgcttttattttttttgagacagagtctctctctgtcacccaggctggagtgcagtggtgcaatctcggctcactgcaaccttcaccttccaggttcaagtgattctcctgcctcagcctcccaagtagctgggactacaggcacgtgcaaccatgcctggctaattttttgtattcttagtagagactgggtttcattgtgttagccaggatggtttcggtctcctgacctcatgatccgcctgccttgcctcccgaagtgctgggattacaggcgtgagtcactgcatcctgcctacattttgattttaatgtcttactgttaatgatccatgcaccaaattcccatgctgttagtatttttctcagaatgacaaaggaattgaaatgccattgtgggataaaattaaatattgtcaaaggcctgctctgagccagtctatggactaggtagatatattggggagataatgaagtaggctcttgttggaaacagagcagaccaaaccaaacagaaaatgaatttgtcagaccaggcacggtggctcactcctgtaatccccacactttggtaggctgaggcgagtggatcacctgaggtcgggagtttgagaccagcctgatgaacatgaagaaactccctctactaaaaatacaaaaaaaaaaaaaaaattagctgggcatggtggcacatgcctataatcccagctacttgggaggctgaggcaggagaatctcttgaacccgagtggcagaggttgcggtgagctgataacacgccattgcagtccagcctgtgcaacaagagcgaaactccttctccaaaaaaaaaaaaaaagtgaatttatctgtgtcttggttttctttttttctttctcttcttttttttgagacggagtctggctctgttgcccaggctggaatgcactggagcgatcttggctgactgcaacctccgtctcccgggttcaagcgattctcctccctcagcctcccaagcaactgggactacaggctcacagcaccatgcccagctaagttttgtagttttagtagagacgggctgtctcagttttcaaataatgaaggtgaattcaactggtaaatgtaggtttctattaaataatgattaaggaaagaaaaataatatttggccctctgtttctgtgggttttgcatccatgaattcagccaaccatggatcgcaactattcaggaaaaaaaatatacagattgtggctgggcaccatggttcatgcttgtaatcccagaactttgggaggccaagatgggcagatcacctgagatcaggagttcgagaccagcctggccgacaaggtgaagccccatttctactaaaaatgcaaaaattagcccggtgcagtggcatatgcctgtaattccagctattcaggaggctgaggcgggagaatcgcttgaacccgggaggtggtggttgcaatgagtcgagattgctcaactgcactccagtctgggcaacagtgcgagactctgtctcagaaaataaataaattatttaaataaagagtattagaggtatgggtaggttatatgcaaatattataccattttacgtaagagacttgagcattggtggattttggtatccacacggattccttgcaccagtctaccgtggatactcagggacaactctgtgtatggtatacaccttggtgtgtattctaatcatctgggaagcttgtgaaatgtaggttcaccccctggatttttaaatcctggaaggtctggggtagggtccaggaatcttcattttcagcagcagggttcctaaataattctcttagaggtaacctgaagactcctttgaggagcattggtgtctcagagggtgtctaaacctgacaaagaccatctaaatctagttggctgagccgggcacggtggctcacgcctgtaataccagcactttgggaggccgaggcaggcggatcacctgaggtcgggagttcgagaccagcctgaccaatgtggaagaaacctcatctctactaaaaataaaaaattagccaggcatggtggctcgtgcctaatcccagctactcgggaggctgaggcaggagaatcgcttgaacctgggaggcagaggttgtggtgagccgagatcacgccattgcactggagcctgggcaacagagcaaaattccgtctcaaaaaacaaacaaaaatctagttggctgaagagttatggggaggaaaaactattttgatatagcacaaactttgtgataaaagtgataaacggagataactgagaaactattaaggaaagagatcagttaacgctcactgaggtagggaggagaggcagatgtctgattttatgttaaacttgaggaatatatctttcatttgattgccttgttttatatacctcataatgctatattgtcttggtaaccaagctctcatatctgtatattactgcagtcctggggcatctctaacttctaacatatactacttttttgataagctattgaactgtcctaagtaggccgggtttggtggttcacacctgtaatcccagcactttgggaggccaaggcaggtggatcactggaggtcaggagttcgaaaccagcctggccaacatagtgaaacccagtctctactaaaaatgcaaaaattagctgggtgtggtggcacgcatctgtattccaagctacttgggaggttgagccagagaattgcttggacctgggaggcagagtttgcagtgagctgagatcatgccgctgcactccagccttggtgacagagcaagactgtatctcaaaaatgaaaaaaagaaatatcttaaataacttttcaacgttcaaactaactcgtggactatggcataaaatcatttgttactcatgagtgttttcgtttatttgttcaggaaataatcactgtttttacacacgcacgcgcacacacacacacattttcacctgccatcacatacacacacacacactttcacctgccatcacacacacacacacacacacacacacacaattttcagctgccatcctagatagtttaccaatattgatgagtctttcttaatggggggacatttctcggaggatttaagtataggttaagtcgatttaaggctttagggggagaagaaaacatttctcaattataaagtatacaactaggaagaaattcttatttctcatattctgtttatttagcactatccattcatttagcacatttacttgtattgacactaccatgcttatgaagccgtgatggctagggagtaatgagcttgttttgctagtgttatcttctataaatgttctaaattaagtagttggggaagtggttaatgacaaccaaatttgtaatctaggattgttaccctctaatcaattctttttaaatttcttcctgacatttatcttgttataataataactctctgacattattattataacaaaattgttgtatttgtgttttggggataaaaggcatattttagcatcctatagtttaaaatggtgtttgttttaatctgggtgataagatggaaatgctgacctgggcttgcctgatctacagctaacattgttctaataaactgcatggagtccaggtgttttactttaactgcagctgtaccatctgtgggagcaggtggacagattctgtgtcatcaggaaaatacagctggtgagactaaggagaagagctaattgattgcttttccagctctctccagtcatatatacctaagcatagcatttaccttggcacaggtgttgcctttggtctggatagtaacagcaaaattgaacaaaaaaagatgtaaatttgagctgcgtgtgtgtgtgtgtgtgtgtgtgtttcttggttggcattgagaaagataatttaagggttttttgtttgtttgtttaggttttatttttgtttttagttacttgaagatatttccagctcgttaacttctctgagagagttccttgtaaggctacttataaatagtagtatatatatatatagtttatggcagggaagatctgggaagtaagcaaaaagagcctttagttaggcaacatagaacaaaatagaggtcacaggttccatgcactgaagaatggaattgaaatagagactccagggtcatagactcttggaaggaagactagagtacattcatgaccctcacccttaattacttcacaggtgagaaaaccaagagctacagaaaataagttattcctcagtaccagggcctggttccttggagaattgggttaaaattcaaaataaccttctaaaaaattctttcagaaacgagtagtgaaagccagtggatcaaattcagtgatagttaacagagaaacagcagcatagataagtaagccaatttaatgtagggagcaaccactagtgtacatgatctcagctcatctggtactaccaagtaaaaatgaacctgggccagccacagtgactcatgcctgtactctcagcgctttgggaggccaaggtgggaggattgtttgaggccaggaatttgagaccatcctggtcaacatagcaagaccctgtttgtttaaaaaaaaaaaattaaaaaaataaaaatttagctgggcttcgtgatatgtgcctgtagtcccaacctacttgggaggctgaggtgggaggatcatttgagcccaggagttcaaggctgcagtgaggcatgattgcaccactgcactgcagcctaggcaactgagtgagaccctgtctcacaaaactaataaataagtaaataaataaaacagaacctgtattatagtgttattttagaaacaattataccattgagatgcatgaagagagctagtagttttgcctatcatacttaaggtttaacttcttcagcttaagagatatatgagagcagcttttgagaggatttaaaagatccctaaaaaaagaaaatccaatggaaaggttcaaaaacttgtgtctgatgaagagaaaatacagaagtttgataagcctttaaggattgttttgtagaagttggctagttgtatacttatccctttagaactagacaggaaggggcaaatttaccttagccatggggaatatagatacgcattgtagattctgggtatgagcagcagcattgccacctgggaacttgttaaaaatgcagaatctgggctctggcccagacctactgaatttgcattttagtaagatttcccaggtgattcatatgaacattaaaatttgagacatattgggataaatcataggctttattttttatttatttatttttttttatattttgagacagtcttgctgtgttgcccaggctggagtgcagtggtgcaatcttggctcactgcaacctctgcctcctgggttcaagcagttctcctgcctcagcctcccatatatgtttgcagcctccctgaattataatttaattacagagtctatcttaattaaataataaagatcattcttatttttcaaaagcatttaaaaaaatggggttcttatctagatgagagaggttttactccataaggatcacagtctagtgatccaataagcaaacaaacgtgtactaaaaccccaggtggggataaatactttgaagaaaaataagctaagattggagagtctttcagtttaagacctaatttattccctatgtgttgtgttttttgttttgttttctttttttcccaggatggaatttcacccttgtcgcccaggctggagtgcagtggcatgatcctcaccgcaacctccgcctccctggttcaagcaattctcctgcctcagcctcccgagtagctgggattacaggcatgcgccaccactcccggctaattttgtatttttagcagagacggggtttctccatgttggtcagactgatctcgaactcctgacctgaggtgatccgcccgcctcggcctcccaaagtgctgagattataggcatgagccaccacgcccggccagtgtgttgtgctttttttttagtttttaatggttatcacttgtaggtaggttttagagcagacttcagttttttgggtttttttgtccctctttttttgttttctcgttttttagacttcagttttcaggacaaaaatatgtacaggttttaaaattattattattattaaaagaattaccttaactcagtgcctggcacatagttaacatttaactgggaatgtttcataataaatctcaagtaagatcttaagaaaatcaacactgattgttacctgtcacaagtcacgtgggctgagatttctggctaggcaggaaagaaagaaaagttcagtcttttgttctctttttcatattattatgatttttggattctgtggattccagaatcagagtttgaacagagaagtggtttctacactttgttgcataccagatgggtatggttttggaataatgaaggggctttcagactgtgggttcttgagtgatttatgacatttctcccgctttgtagttgtttttcttggaacttgcctagatgggcatgccatgaacttgcaaacgttgttctcattttcaaataaaataattttgttgcaatttatttttaggattaaaaaaaaaatccagatgctcacttaaatacataagaagacaaaccaggatcaatcttaataggagaaaggtatacatgtagaggggaattaactttatgcttgctatgctagaaatgagctggttgagttgcactcaggtaatagtatggtaaggtatatttttttggttaatttgaaaagaaaatgtatatatgtatgactgctatatatgtcagaaaatgtgacaaatagcttttttttgttgttgagatggagcctcactgtgttgcccaggcatggagtacagtggcacgatctcagctcactgcaacccttgcctcccgggttcaagcaattctcctgcctcagcctcccaagtagctgggcttacaggtgtgtggcaccacgcctggctaatttttgtattttttaatagagaagagatttcaccatgttgtccaggctggtcttgaactcctgacctcaagtgatccacctgccttggcctctcagagtgctgggattacaggcgtaagccagtgcacccggccgctttttttgtaaatggctttgttgagatataattcacataccctacctccatttttttttttttttgagacagagtttggctcttgttgcccaggctggagtgcaatggcacaatctcggctcaccacaacctccgcctcctgggttcaagtgattcttatgcctcagcctcctgagtagctgggattaccaggcatgtgccaccatgcccggctaattttgtatttttagtagagatggggtttctccatgttggtcaggctggtctcgaactcccgacctcaggtgatcttcctgccttggcctctcaaagtgctgggattacaggtgtgagtcactgcacctggccctaccctacttctttaaggtatacaatttaatagtttttagtatgttgacaaggttttataaccatcactgcacacagtgcagtgaatatttatatcactccgaaaagaaaccccatacccattaacaattactgtctatttttcctttccccagtccctaatctacttttttatttttcccttgagatggagtctgactttgtcacccagattggagtgcagtggtacagtcacagctcatcgcagcctcgaccacctgggctcaagcaattctcccactacagcctcccaagtagctggaaccactggcacatgccaccatgcctgtgaccagtttttaaattatttgtagagatgaagtctcactttgttgcccaggctggactcaaactcctgagctcaagcgatccttgtgccttggcctcccaaagtgttggaattacaggtgtgagccactgcacctggccacgtaatctactttctgtctatggatttgcctttgtgttttttattggtgattggccttcaagtataatgctgaagtgctgtctcctgtttccaagagctagaaagctatgctgtactttagaggaaaatatattaaataagctttgttcaggctgtttgacatgttaatgaatcctcccgccttggcctcccaaagtgctgggattacaggcgtgagccaccgcgcctggccttacatatattttaagtaaggtgttaacactatataattcatctgtgtaacccaaaactactgtatccctaaggctattgaaatttaaaataagtaaataaataaggtgtctttcatcagaaacacataaaaaagaaggtgtgtactgatgatctactgacaaaaatgtgactagaggctcacaggaacctaaccgtgtgttttcctctaggagcaaaggttcaggatttgctagttcaacgtttgtagcaataaaaataatctattataccacattttgtttattcattcatcagttgatggatttgtgacctgttttcactttttggctattataaataaagccactataaacatttgtttactggtttttatgtggacacgttttcatttctctcactgcgcccagcaatgaatacatttattttatggcaaaactaaaagtttgtcaaacacccaaattcagtatgataagttagctttttataggatactgacaggttattgtgggtactccaatcttgttcagcaaggccaaattttcaaaaaaaaaaatgtagatttattacaataagggaaatatatatcttaagctatatttccatgtgttctatgaagacaactctgagaggaagttagcagtttgtgtggttggaagcctcagaaagttctcctacttctatctcttactcacctggcttgcattgcaatatttagggtaagagtcacaagcatactcgggtgcatttgaatgatggtctaagcagatctctacacctgtcgttatctgggtttgtgatcattccagtgtttcctaagtttataggatgaattggcagtaagtgacttttgttccagtcctcagctgcattataaagacaatacaagactatgctgaaatagctatttggtaaagttttgtaaacccagaagcctttttaaaaagtattgttcttcttaatctcttaattatagttttttaaaatcacatatcacttaattttgtgtgtgtatttttgtttgtttgttttttgagatggagtctcactacatcacccaggctggagtgcagtggtgtagtcccggctcactgcaacctctgcctcccaggttcaagtgattctcctgcctcagcctcctgagtagctgggattacagggctgtgccaccaggcccgactgattttttttttttttttttttttgagatgaattcttgttctgtcgcccgggttggagtgcagtggcgtgatcttggcccactgcaaccactgccttccgggttcaagcagttctcctgcctcagcctcccaagtagctggtatcacagatgcgtgccactacgtccaactgatttttgtatttttagtagagacagggtttcgccatgttggccaggctggtctcaaactcctgacctcagatgatctgcatgtctcaggctcccaaaatgctgggattatgggagtgagccacctcacccagccctaagtcttattgttttttcttttcttttcttttttttttgttgtatttttagtagagacagcgttttgccttgttaaccagtttagtctcgaatgcctgacctcaggtgatctgcctgtcttggcctcccaaaatgctaggattagaggtgtcagcctccactcccagcctgatttgtatatattttatgtttgttttattttcttttttttctttgctgtattattattattttgagatggagtcttgctgtgttgtcaaggctggtctccaacttctgggctcaagcagtcttcccacctcagtcagctgaacagttgggattgcaggctcatgccactatacctggctgaagtgttggtttttcttttctttttgtagagacaaggcctcactccattgtccaggctggtctcaaactcctgggttcaagcagtcctcccacctcagcctccccagtaactgggattacaggctcttgcctctatacctggctcaagggtttgttttctgattcttcaaagtttacttctctcagatctggagactgtgatatgtataagacaagtttcccatgtcttaagaaacttgatagctagtaagagaggtaaggcctgtgaactcaggtaactaagcaagacagaaagacagatgaagatgaggacatatgagtagaataaaggaagtgatcagtaaaggttgcatgtggaaaatgttgtctgaatcagtcgaagaattgccttcaacatgacctagagaagagcagatcatgaccgaaatccagaccttttcactggcttgattgtttggtgggctatttttctctcttttttgaatcagaggatcccagatgagggctttattatcagcctttgactgaagtctcagttatattcttgttcccagcccatgcgtgtggaatcagggatatgacttacatgcccttttaagctgctctgtacctttttgccagttatatatacatgtaactatgttaacctgccttaaatgtccactcgtgtgtgtgtgtgtgtgtgcgtgtgtggtgtagtgacgggatctcaccatgttgtccaggctggtcttgaactcctgggctcaagcaatctgcccactttggcctccaaagtgttgggattacaggcgtaagccactgcacccggcctaaaatgtcaactcttggttgagaatgaaggctaatttgcctaagaaccaacttaatccatctgttccagccagtaccaagttttgggctcgtgatgccaccaattggctggtgtgaggaagtgtttaacctttttcttttccttttgggagtttgcactacgcgtggaccagtttgtttgttttttttgtttgtttgtttttttgagacggagtcttgttctgtcgcccaggctggagtgcagtggcgcaatctcagttcactgcaagctccgcctaccgggtttacgccattctcctgcctcagcctcccgagtagctgggactacaggtgcctgccaccatgcccggctaattttttgtatttttagtagagagggggtttcactgtgttagccaggatggtcttgatctcctgacctcgtgatccgcccacctcggcctcccaaagtgctaggattacaggcgtgagccaccgcgcccagtgcaccagttatttttaccttacgacattttctcacagattcatgttctcctttggtaaccttccatcaagcctctttcaactctggtttaactagtgcaggagctctttccatccctctttcctttactttgttctctttgtaagttacaaaagagacaagccaggcatggtggctcgcgcctgtaatcccagcattttgggaggccaaggctgaggcaggtgaatctcttgagcccaggagtttgagaccagtctgagcaacaaaaaatgcaaaacgttagctgggcatggtgatgtgccacacctcaggaggctgagatgggaggattgcttgagaccctgtctttaaaaaaacaaacaaaaaaaaactaggcataagattacttctagtgtcttgtatcaagaaagaagaaagcagttatatatatatatatatatatatatatatatatatatatttctttttttttttttaatgagatggagttttgctcttgttacacaggctggagtgcagtggtgcaatctgggcacactacaacctccccttcctgggttcaattgattctcctgcctcagcctcccaagtagctgggattataggtgtgcgccatcacacctggataatttttttgtatttttagtggccacagtgttgcaccatgttggccaggctggtctcaaagtcctgcactaaggtgatccacctgcctcggccttccaaagtgctgggattacaggcatgagccacctcgcctggcctattttattttattttttaatagagatcaggtctccctgtgttgtccaggctggtctcgaacttttggactcaggtgatcctcctgccatggcctctgaaagtgctgggattacaggcatgagctatcacacccagcctctttgtttctcttttgtatcttgttcaatctctgaatctccttaaggctggcttcacctctggtggcaaaatgactaaagctacatgtccttatacctcactgtcataatgagagcatgagaggcaatgcttggcattccacgtaggagtccagcaaaatagcctgattgaaccagcttttaggtctgatgcccattgtttgttttttttgaaacagagtctcactccgttgcccaggctggagtgcagtggcacaatcttggctcactgcaacctctgcctcccgggttcatgcaattctcctgcttcagccccccaggtagctgggattacagccatgcgcagccacaccagctaatttttgtattttttgtaaagacggggtttcactatgttggccaggctggtctcggatcaccttaagtgatccgcccacctccacctcccaaagtgctgggattacaggcgtgagccactgcaccagcccacatgcccattcttgatccacttgtaggaagcactataaaagcacatgaacaaagtgcggtgcgtgttccatgaaaataaagatggcgccaggcgcggtggctcacacctgtaatcccagcactttgggaggccgaggcgggcggatcatttgaggtcaggagtttgagatcagcttcacctacgtagtgaaaccccatctctactaaaatacaaaaattagccgggtgtggtggcaggcgcctgtaatcgcagctcctgtaatccaggccgtggcaggagaattgcttgaacctaggaggcggaggttgcagtgagccgagatcacgccattgcactccaacctgggcaacagagcaagactccgtctctaaataaataaacaaacaaacaaacaaggcttctagttgcagtaggagggacgaattgagagcaagggtttaaggactaaatgcagggtgcagtacagtgtcagtgtcagtgtgcagtgctcaggaaatatttgttgaaggggaagagtatgcttcttcagtccaaggtggaagcatgaaggaaactgtaagcacattgatctagaccacagtttcaggtacagaggggagcgttaactaaagctcagagcggggaaagcacagggtgcttacaaaatggcaaatgctgtcatttaggccagaatcctactcacactgctgctgtatatcctcttcatctgtgtttaggattttgaaatgcatttttgttggattattgccccactagaaaaaacagttcagatctgttgcagtttcacatttgaaactactttcattctggaatccttatccttagaccttcctaataatttctgtggtcacactggacctgatctcttcctgtgctaaacaaaagcacacaatcacaaaactgtgtaggcataaatgagaggcatatgggagtggtgtaaaaggaactggaagagtcttaatatgcctgggtgggcgagctaaactaatagctcccagcagtttttctgaatcagacattgtggagccaggagtctagcatttggaattccactgcctgtgcaaagggtctgtcttttatcctccaaaccaccatttgttaactggttaatgacccagtggacccgttgacaacaaaggagggaaagctggtaaagatcaagttaaaaggaaaaagaaaagttcaaaggtaggaaagtaagaacaagaagggtttaatcatatcttcacctactctttattttttaacaatttattgtggggaattttgaacatacacaaagtagatggagtaatgtagtgacctcccatgaacctatcccctcagccccaataagctgcagttaccagacttaatgaaaggaaaccagaactctggtgaggcttaggtttggtttccagacctctctaggccttgtcacctttggccttatcccatcaaacacctcttttccccatttttagctcctggtgtgcacagaacactgcgtttaggctagtgatgagtatgacagtacttaacctctaatagattaaggaaataactgttattgttcaagtatggttttgagagcagaaaagtgtaattctgtcaaaggtacacaacgaagagggaacttaggaaggcattattgagaagttgacatttgagtttacagcagaaacgttgggcaaggggtagggaatgatctctgagatagcagcatacccgatctactagctctttttcaccaggctatttagagtttgacatttatgttacatttataacaaggtacatttcaagtgtagctttcctttttgctttaagcaactgagacatgtaagtcaatttcagttattttctgctaaactgtgtgtctctttgaatgttcactatcaaggtgaattatacaaggtgtgttagatccttttaacatttcagagcaaccaaaaccaagtttgaatgtctcatttaacactgtgagaggatgtatcttgtctgcatcttgtgtttcagttgtatttatcggtaaaataagccaggggagtattctgacttgcagtttaaaagctgacaggcctaggggaatgttccacaaaatagtatattttgtatatggcatggtattatagataaatgagctattgtgctgcctggcactgtcttctcccttgtgctgtcttctgctgtttctcaaggagtgattcctctctgtgttttggaaccgtgtttctcactgcctacagatgatgtccatttggcttatttcactgtcatctcatacacagctgtttcaaactgcatggaatcctcagagaactacacgccccttcctgaacaaacagtgcttcttcctgcattttcttcttaaacttttatcacttttccccccttacatatacttttgttttattctttcactaaaaaaaaaatgaggtttaattgacttacaataaactacacatatgtaaagtgtacagtttgctcaggtttggcaggtatacctgtgaaatgatcactgcaatcaagatagtcaacatatcattcactccataaagtatccttgtgcccattggtaatctctccctcccatgctccccctgccctgtctccaagcaaacactaatctgctttcagtcactatagattagtgtgcattttatagaattttatgtatatatgttttatatagatgaaatcatacaatatgcactcctttccttccatcctttcttcctttttaggtctggtttctttcatccagcataattattttaagatgtatgtatcagtagtttattccattttattgttgagtagtattctgttgtatggatatatcacatttgtttatttgcctgtggatagatgtttgagttgtttccagtctttggctattgcaaataaagcttctttgaacattcatatataaatgtttatatggacatatgcttgcttttgtcttttcttttttaaaaaaaaaagcacagatgggaaccgggcgtggtggctcatgcctgtaatcccagcactttgtgaggctgaggtgggcggatcacctgaatgttaggagttcaagaccagcttggccaacatggtgaaactccgtctctactaaaaatacagcagttagccttgcatggtggtgtgtgcctgtaattccagctactcaggagggtgaggctggagaaccgcttgaaccctggaagtggaggttgcattgagccgaggtttcagtgagccgagatcacgccagtgctctccagcctgggtgacagagcgagactccatctcagaaacaacaacaacagcaacaacaaatagagatggggttcgagcccaggctagtcttgaactcctgggctctagtgatactcctgccttggcctcccagacaaagtgttgggattacaggtgttaaaccactgtgcccagactctttttcctttgtaaatacataggaatggtgtggttgcatcatatgttttaactatttaagaaattgccaaactttttctaaaatattttcaagtacttaccatctatatatcttctttggtgaaatgtctgtttaaatcttttacccatttaaaaaaattacattgtttattttcttgctgttgaggtttttgtttgtttgtttgagacagtctcactctgttgcccaggctggagtacagttgtgcgatcccagctcgctgcagcctccacctcctgggttcaagtgatcctgaacttcctgagtagctgggactacaggcacgcgccaccacgcccggctaatttttgtatttttagtagagacgaggtttcaccatgttggccaggctggtcttgaactcctggcctcaagtgatccgtccacctcggcctcccaaagtgctgagattataggcatgatccattgcccccagcctgttgaggtttttttttaaatcaggtatataatcaggtatatgctttgcaaatattttctcccagcgtattacttgtctattttcttaacagtttctttcaaagaatagagttaaaaagattttttgtatctttttagctttttttttttttttttttttgagcagtcagaacacacacagcatttattggaagttttccatcttatatgggcacagtttgtggctccccaaaacaattagaatagtaatatcaaagatcactgatcacagatcaccataacagatataataataatgagaaactgtgaaatgtcgcaaaaattaccaaaatgtgatccagagacaggaagtgagtgcatgctgttggacaaatggcactgatagatttgcttgacacagggttgccagaaaccttccatttgttaaaaaatgcaatatttgtgaagtacaataaagtgaaacacagtaaaatgaggtgtgctgggcatcctgccatttatgcacatgcctctttaggtagaaaataatcctgtaaaagttgaggctgtggttgcctttctgagaatcttgtctacagaaatggtcaactggtggccagctagccaaagggctaatctagcccacagacatgtttagttggggctacatagagctttttacaaatttgagtcaatatttagaaaataaaagtctggattttgggattcccttacaaaaactggaaaatttggccacactgggtcatattcccacatagtcgtggtggttggggttcagtagcagtagctgctgccccttaagacaggtccccatggtccccactcagttgcttccttatttatcttacaagcctggcaaggaatttgagttgaactgatctagaagattggtgctaagaaccagctcagtggcttagctgtcctggggtctgcaggagaaggcttctttgttaggcccaggcaggaagtctgggcatggattgagttttatttttatttttttattttttctttttttttttgaccttttaaatatttatttattttattttattttatttatttatttatttttaattgatcattcttgggtgtttctcgcagagggggagttggcagggtcataggacaatagtggagggaaggtcagcagataaacaagtgaacaaaggtctctggttttcctaggcagaggaccctgcggccttccgcagtgtttgtgtccctgggtacttgagattagggagtggtgatgattcttaacgagcatgctgccttcaagcatctgtttaacgaagcacatcttgcaccgcccttaatccatttaagcctgagtggacacagcacatgtttcagagagcacagggttgggggtaaggtcaccgatcaacaggatcccaaggcagaagaatttttcttggtacagaacaaaatgaaaagtctcacatgtctacttctttctacacagacacggcaaccatccgatttcccaatcttttccccacctttcccccctttctattccacaaaaccgccattgtcatcccggcccattctcaatgagctgttgggtacacctcccagacggggtggtggccgggcagaggggctcctcacatcccagtaggggcggccgggcagaggcgcccctcatctcccagacggggcggctggccgggcggggggctgaccccccccacctccctcccagacggggcggctggccgggcagaggggctcctcacttcccagtaggggcggccgggcagaggcgcccctcacctcccggacagggtggctggccgggcggggggctgacccccccacctccctcccggacggggcggctggcctggcgggggctgacccccacctccctcccggacggggtggctgctgggtggagacactcctcacttcccagacggggtggctgccgggcgtaggggctcctcacttctcagacggggcggctgccgggcggaggggctcctcacttctcagacggggcggttgccaggcggagggtctcctcacttctcagatggggcggccgggcagagacgctcctcacctcccagacggggtcgcagccgggtgctctcacatcccagacggggcggcggggcagaggcgctccccacatctcaggcgatgggcggccgggcagagacgctccttacttcctagatgggatggcggccgggaagaggcgctcctcacttcctagatgggatggcggctgggcagagacgctcctcacttcctagacgggatggcggccgggaagaggcgctcctcacttcctagatgggatggcggccgggcagagacgctcctcacttcctagacgggatggcggccgggaagaggcgctcctcactttccagactgggcagccaggcagaggggctcctcacgtcccagacgatgggcggccaggcagagatgctcctcacttcctagacggggtggtggccgggcagaggctgcaatctcggcactttgggaggccaaggcaggcggctgggaggtggaggttgtagcgagccgagatcacgccactgcattcagcctgggcaccattgagcactgagtgaaccagactccgtctgcaatcccggcacctcgcgaggccgaggctggcggatcactcgcggttaggagctggagaccagcccggccaacacagcgaaaccccgtctccaccaaaaaagtaagaaaaccagtcaggcgtggcagcgcgcgcctgcaatcgcaggcactcggcaggctgaggcagtagaatcaggcagggaggttgcagtgagccgagatggcagcagtacagtccagcttcggctgggcatcagagggagaccgtggaaagagaggaagagggagaccgtgggccgtggtgagagtgagagggagagggagagctctttttagcttttatagcttttgttgtgtctaaggaatctttgcctaacccgagttcacaaagattttcttgtatgtttttttctggaatttctgtagtttttagatttacatgtagatctaatattttaatacatggtatgagatattaaggatccaagttcagttttttgcatatgaatatccagctgttttagtaccagttgttgaaaggactatcattcctctaccggattgtccttgtacctttgtcaaaaatcagttgtttatatatctgtgggtctgtttctggactctgttccattgatatgtttaccttatctttatgcctgtaccacactgttttactataacttgaagtgaggcagttttagtcctctagctatattcgttttcaaagttgttttaggtaatctaggttctttgcatttccaaataaattctagaattagcttctcaatttcttaaaaaaaaaaaaaagcacgttgggattttgattgggactacattgaatctgtttgggggaagagctgacgtcttaacagtttaggagagatacaaattaacaaattaaattagtgattttattttaattaatgtttctcagtagtatttttgtgtttttcctgtacaggttttatgtcttttgtcaaatttttctcttaatatttcacaatttttgatactgttttaattttttcagaatttcagtatttggtcattgctactctatagacatgaagttgatttttgtgtattgatcttgtatcctgcaacttggctaaattcacttattttaatagctttttggggagattccattggattttcttttttctttttccttttttttttgagatggagtcctgctttctcacccagactggagtgcagtggcccaatctcggctcactgcaacctctgcatcctgggttcaagcaattctactgcctcagcttcctgagtagctgggattgcagttgcctgccaccaggcctggctaattgtatttttagtagagacaaggttttaccatgttgcctaggctagtcttgaactgacctcaggtaatccacccacctcggcctcccaaagtgctgggattacaggcatgagccaccgtccctggcctccgttggattttctgtacatcatttgcaaataaggacaattttacttctttccaattatcacttgttttacttatttacttattatcagtattttctgtgttgtcactgcttcagagattctgtccttttcaattttcttttgttatcttcttggtcttagatattatcatattgttgtttgttttttttttttaattagttaatggctttctgtgaggtattctctcagtctatgttgtcttcagaaaacactggtttcattttgttcagggccatatcataattcctagctaccaattacatgaagttccaacttatttattcctccacattgggatcaaatatttcttcctgtcaataattggcatttctgtttaccattgcaacttattctagcctaggtcccacttaaaattatagttggggagagagcatcagagttgaggttcggaaatttggtttgaattcccattttgctgcttagtgtctgtataatcttgggcaagttttttaactgttaggcctgtttgcttatctgtaggaagagagtaacacaagaactttacaatatgtcatgtgaattgaaagagagaacatagaaatcatagccatgtgcctgcaacacagtgtgggtagtctgtaaatatttagtctggcactagtgtgagcaccaagtgaaggaatgaatgcttgtttgcatatcctatttctgcactgttgcttatgctgttctccaatctcttttcaggccctctgcatcttcctcatgtttcgaggtcaatgaagcccatctttattactcatttcctatcattgtttacatccctgttgagttgatatcttactaaacttagggactgggagtatatctttggaaaatatttgttttcctcaaaatgcctaccataaatgtattataggtccctaaaataattggttgattgtatagttaatttggaagcagtgcatcaaaatactttgtagggtgacagcgaagtaaggttttttttgttttttgtgttttttttttttttggtagaagacagtctttgtctgtcactcaggctggagtgcaatggcatgatcacagcttacttcagcctcaaactcctaggctcaagcaatcctcccacctcagcatcctgagtagctgggactataggtgcgtaccaccatgcctggataatttttttttttaatttttatttattgtagagatgcagtcttgctatattggctgggctggtttcccaaaggcctcctcaagtgctgggattattggtgtgagccaccatgtctggcctgtttgttttttggtcagatttaggttttaggagtgaagtaagttgaattttacatgctacagtggaagtggcagaaatgtttttgtttgattaaaagtagctttaagagaacagtaattaactttttaattttggccatcaaacaaggagggttgctcataaaacagaatgggagtttggtaactataaaccatttattaaatgttttttaaaaatcacattgtttcaacattgaatgtggtagaatattcagtatttcctttaggtttacatgtatagtcttatgtcttttaacaacagaaatatgttctgagaaatgcatcattaggtgatgtacaaacattatagagtgtacttacacaaacctacataatatagcctactacacacctaggatatatgtaaacctgtaatagtagctaacagcatgttactgtactgaatgctgtaggcagttttaacaatggtgtttgtatatctaaacatagaaactgtacagtgaaaatatagtaatcttatggtaccacctttattgactgaaacttcagctaaaaatgataaacctgattaatatgcaaagcagcccttataacatgctttttcaaaaacagcttaagacttttcagatttcgttaagaagttatatggtaacatgctgactagagaatgatttattgggctagttagcattttaaagtaaagggaatggaaaccagaagatgatgcaagggtacttttattcgttgtgttaaaaagccatagtaaaagccgtagtaatcattctaaactgttggatgcttccttagtgctgcgtatataaagtatgttaataaatttgatatctagggtacttgttagaaccctaactggcatagcctataactccagaatcaccattctaattgtattctggagttgtgctctacagtggtgctattcacatagaatataatgtgaaaggtaaccctagagttgtgcaagtagaaggtactagcttaatgaatttggctctaataagttaataaagtaatttgaacattccttgagaggtaaagtttaagatgcactgtgggacgctagaaagtaatttgcaggcagccaggaaatctggtttctggaaccagtcaactggcacctcactttccccatagtaccatggaaactttgattagatgtctcttccattgctgatattttgcatttaggtgatggattgaagtcaggaactagatctagcattgagggcactgaaaggtggttgtcatgtagtccagaggtcaagggtcaagtgattagaagcagtttgttcagaggtcaagtgattagaagcaggttaagccaaagttagactcatgattttagcagggaatgtgaatggaaatccatatacccgcccatctccattggttggagaccagcgggtcatctttcttaaattgtatatgggtgtatggaagggatttgaaattgacgagtcgtataactgagtaaggacagagaagccggactctatttttccattaggtctagggctttctagtgcttaagatgagttcttgctcctgctctgttactcaggcagtggcttgattgtggtagacacttatgacctacacattttagcctaggctgatgcctttccacagttatgttcctggtttgtttgtttgtttttagttctttctctgtcagttacaggtacattttcccaaatcatctgaactcaaaattctcctaacttttccatgaagcctttattgttctttgcctagctggaagagactttttctataatttttggtactttttacttgttactttttattatatcttgtgttatgcatacatttatcccctactatattactgaaagcagggactttgtcttagtgctacaggtttttgtttttgtttttgtttaatttgagacagggtcttactctgtcacccaggctggagtgcagtggcatcatcatagctcactgcagcctccatctcctggactgaagtgatcctcccgcctcagcctcccaaagtgctgggattataggcatgagccactacacctagcagttttctcaaactttagtgtatagaggagtcacctgaagaacttattaaagtttggattcctggaccccctattctgattacttggttctgatttaggcctgggaacctacattttaacaagttcctcagatgagcttgagtatgtgggctagaggaacatgtggtttacagcatctagcctagtacctcgttttgctcttctattgcctgagtggttaagtcagtgatcagttaaaaccaataatcattggtaactctgctagaagaaccagtcttaacacctgtgaggaactagatctattttgttcctggctacctagtattttacaggtttttgtgtttacatgaactttttgtaccctcagtttaagatgccctttgattttagttttaaatttttttttattataatttttttcattaagcctcttccattttaggatgattttaattttaaagcttctgaatactctctcaattatcaatgtatatatattgtggacatatgcatttgagttttgttgttgttttgcctttaaacttatatgtcttattaaaataaactctacagaaattgctatattcagtctttgtaggaactaacagaagaagtctttcttactaagtctttttttggggggttcaggaacagggtcttgctctgccatggaggctggagtgtggtggcacgatcttgactcattgcaacctcctcctcccaggctcaagtggtcctcccacctcaacctcccgggaagctgggactacaggcatatgcggccacacctgactaattttatgtagttttggtagagacagggtctccccgtgttgttcaggctggtctcctggactcaaacaatctgcctgcctggcctcccaaagtgctggaattacaggcttgaaccaccatgcccggctatttcttactaatacttaatttgtattaagtattagtaagacaaatttttattattattattttttgagacagagtcttgccctgtcgcccaggctggagtgcagtggcatgatattggatcactgcaatctctgcctcccaggttcaagcagttctcctgcctcagccccctgagtagctgggattacaggcgcatgccaccatgcccggctaacttttgtgtttgtagtagagcagggtttcaccatgttggtcaggctggtcttaactcctgaccttgtgatctgtctgcctcggcctcccaaagtgctgggattacaggcgtgagccaccgtgcccggcgaaaaattattattttatagtgatacacttttgtattagatattatagggaaaaccagaataagtagatacttaaagattttctggcgcaatggagtgctgaagacaaacacgtaaaatagttaacattcaaggcagttcgcaacataggaccaaatgaatggtctgcatcaataaaagtaaatagttattagagttcaaagaagtgggggagatgaacacgtactagagaacctggaaagcctccatggagaaggcaacaggagctgaacttgaaggtgttttagatttcagtcagaggaaaagagcgttcttagagggaagaacatacaaagattcattttacaattggaaaaaacggaagctcagaaaggtaaagtgagtgtgtgctgaggtgccagtctcctgaccactgctctgctttgtgcagcatttggaggtttttcattgttgccaagtagaagacaggcaacattatgataaccatatttcaaagcactgataactaaattaaattaaattaattaattaatttatttatttattcattttgaggtggagtctcactttgtctcccaggctagagtgcaatcctgtttgttctaccttgagactatatccagaatccagaatccaagtaacatcttacctttaccccttccattcttgtccataccactagcatctctggcctggattattggagttgcttcctagttgttttccctgtttccattcttgccctaccatctgttttgaacatagcagccagagtggttcaatttagtcaggtcatgtcaattctctgctcagaaccctgttaatgactcccattttactgaaagagaccaaagtttttccagtggctggaagctatctgtgatctgcttccctctccctgcccactgcttgacctctcagctcatatcctactacttttcagcttcagccacactaacttcttgcagttccttgaagactgtaggcctagtcttgcctcaggacctttacctagacaattcttttttcacctgtcctgctgcggctcatttcttcccttctctgcaaggtcaaccaggctaccttatttaaaactgtgccccatctcactttaccagcttattaccttctgatatactgtatatagtatttattaattttgtttgttctttgtctcctcttgctagtttcagagaagacagggaatcttgtctatttgatttatttttatttttatttatttgttttttatttttttgagatggagtctcgctctgtcacccaggctggagcgtagtggcgcgatctcggctcactgtaacctccacctcctgggttcaagcagttccctgccccagcctcctgagtagctgggattacaggcacctgccgccacgcctgtctaatttttgtatttttagtagagatggggtttcaccatattgggcaggctggtcatgaactcctgacctcatgatccccccgcctcagcctcccaaaatgctggaattacaggcgtgagccactgtgcccggcctatgtggtttattgatgtatctccattgcctcaaacatggtcaggcatctgatagatgcacaataaatatttgttgcatgcatgagtgaatagaatagaacagaatagaatagaatagaatagaatagaatagaatagaatagaatagaatagaatagaatagaatagaacagaacagaatgcaaggtagacaggcagtcccaactctcatgaagcttacagtttgtggtttctttactccaaatgacgttaaccatgtttttcacattttttggtatgtgtaattcaaaacctttgtgaaataataagcatttaaactttaggaagcagtgtttcttaaaaagaatgtgatcttggggtatgttttgaatcaactgaaaactataaaacattaaatagaaaagctgtgtgccaggaaaggtgattgcttgatcagtttttgaaaaatgccactagataatttttgatcttaattcattcctgtggaacacttaactacaaaatttccttgaaataaaatgcaagttattagtgggattgttagtgggattcccaaatgaaatgatttttagctctcattaagactctttctttctctttctttctttctttctttctttctttctttcgttcgtttgttttcctctaggctggagtgcaatggcacgatctcgcctcactgcaacctctgcctccgggttcaaggattctcctgcctcagcctcctgagtagctgggattacaggcacatgccgccatgcctggctaattttttgtatttcactagagatgggcttccgccatgttggccaggctggtcttgaactcctgacgtcaggttatctgtcccctgttggcctcccaaaatgctgggattacaggcgtgagccaacatactcagactttttcttatctttttgcagtctaccatagaaaaacacagaatttcatttctgttcatttaaaattctgtggtagaaaatcaaatatggaagacttttgaacaaatatccagtgttgaagcaaatgtaaatagtagatattatattgatgccaactgaggaaatatgattagacttagtcaataaatgaagctgttaacataatctgtcatgtgccagtttaaataatgaaagcattactgtagtaggatgttttgttaaatgtcctacaaggcctgtatctttctgtgcaagcctaccatgtggtagacacttaataatagttgatgataataatgctgaattatctgcctcttaaatttgtttatctgagggaagaggtgcttatttgtatataaactgctaatttatctgttagtaactgacattttttctttactttttcctgaagatttgcaattaatttaataatagaataaacatttttgtattgtttttatataggataaataatgaagcttataaaaccaggccttagcagccacactgtaaagactaaagaaaaggacattttcagttggtataaattttctttttgtttatttggtgtaaattttgaatttcttcttttttttggtctgaaaaattaatttagctcagcatggcctatctggatatactttttttttttttttttcttggagacacactctctctgtcatccaggctggagtgtagtagcagccaggatcacggctcactgcaacctttacctgctcagctctagcaatccttccacctcagcctcccaagtactctgcaggcatatgttccacaggcacctgccaccatgcctggctaattttttttttttaattttttgtagtggatacaatttttattttttgtagagatttattttttgtatttttttatagaggtctccctctgtttcccaggctggtcttgagctcctggggtcaagtgatccacctgcctcagcttcctaaagtgttgggattacaggcgtgagccactgtgcctggcctgggtgttttctttacaattgagtttaccatttgtagcagcaaaagaaaagaaaaataactccacattacctctctgtttagtttcatttcggagccagagtttgttaaaagtgtgaaatactgtgccaggctcagtggctcatgcctgtaatcccagcattttgggaggccgaggcgggtgaatcatctgaggtcaggagttcgagaccagcctgaccagcatggtgaagccccaactctactaaaaatacaaaaattagccaggcatggggtacacatctgtagtcccagctactcaggaggctgaggcaggagaattgcttgaacccaggaggcagaggttgcagtgagccgagattgtgcagttgcactctagcctgggcaacagggcgagactccgtctcaaaaagaaaaaaataaaaaagaccggaaataaaaagtctgcttgggaccaagcatggaagattatgcctgtaatcccagctatacctttgaagctgagtcgggaggatgacttggacccaggagttcaaggctgcaatgaactatgattgggtcacagcactccagcctgggtaacacatctctgagaaataaaaaatttaaaaataaaaatataataaaatggccagtgctgttgctcatgcctgtaatcccagcactttgggaggcttaggcaggtggatagcttgagtctaggagtttgagaccccatctctacaaaaaactgcaaaaaattaaccaggcatggtgacatgcacctgtagtcctgctactcagaaggctgaggtgggaggatcacttgaggtgaggaggtcaagactgcagtgagctatgattgcacccctgcactccagcttgggcaacagagcgagaccctgtctcaaaaaaatgtgtgtgtgtgtgtgtgtgtgtgtgtgtgtgtgtgtgtgtgtaagtaaaattaaaagtctgcctggcagaaaattaggtgtatattataaaaatctgtataggcactcccagtattttgaatgaaggcatgtcaacaaaactagatgtaaaaacctctctgtgaagtgaacattatttcgttactaatttttatttataaaaccagaaatactttactgaggggtaaggcagttacacttgttttttgttttgttttcttttctttttgtggagaatggggtcttgctgtattgcaggttttgaactcctgggctcaagcgatccttccacctctgcctccttaagtgctgggattacaggcatgagccactggacgatacctggcctgaggtgtaggaagaagaaataattccagtatataaagttggaaattatacaaagaaggcaggatctctagattattctgcttgtcttataattgctgggcctctaattaatttttagcattcacctgtaggtttccttttattttgagtactgggagtttttatttttattttttttattttttttttgagatggagtctactctgtcgcccaggctggattgcagtcacgcaatcggctcactgcaacctctgcctcccaggttcaagtgattctcctccctcagcctcccaggtagctaggattacaggtgcccaccaccgcacctggctaatttttgtaattttagtagagatggggtttcaccatgttggccaggctggtctcgaactcctgacctcaggtgatctgcctgcctccgcctcccaaagtgctgggattacaagcatgagccaccgtgcctggcctgatttcttaattagttgtgtagtctttggacttagtttcctgtgggttcagcaataagtatagttatcttaataaaactcatattttaggcttttcaacctcagattttctgcatatatcaaaataaattctgggctgggtacagtggctcacatctgtaatcccagcactttgggaggccaaaatggggagattgaggccaggagttgaagaccagtgtgggcaacatagtgaaaccctgtgtctacccttcccccgaaaaaaagccagacatggtggcattcttctggagttgccgctactcaggaggctgaagcaggaagatcacttgagcccataagtttgaggttgcagtgagctatgattccctcctttgcacttcagccccatcctggatgatagagcaagaccctgtccatctgtccatccgtccatccatccatccatccatccatccatccgtattcattcattgtacttaagaatgagctatataaaagtgaaaccacgggagttctagaagaacatataggtgcatattcttataatctgggacgaggaaaatctaaacatgatattaatattagttgacaaactactgatgagagcataatgtcagaataatcgaaaaattattaaaaactatttggttagggcagaatttctggaatgttggattaaggtgcttgggaaatcctccctccataaagcagataaaactggacaaatttataaaaaaaaaaaatcaaccattttgaacttgtgtagattgttcccagcagcattactaaatagccaaaaattggaaacaatccaaatgcccattaactggtgaatagataagcataatgtgtattcatcagtagaatactactcagcagtaaaaaggagtgaatcttgatacatggtacagcatgaagctcagaaatattttgctaaattaaagaagccacaaaagatgacatatcctttcatttatgtgaaatgtccaggaatagcgaatttatagggacagtgaaagcaagattagtagtggttgtctagggctgtaaagggacatgagggatcttttaggggtgatgaaaatgttctaaaatggaattgtgatgatcgtacaactgtaaatttactaaaaatcattgacttgtacactgaaaataggcaaattttatggtctgtatattatacctcaataaaacttatttaaaatgttggcaggggcagagggacaacaggttttttcccctgctgcaaaggagtagtccaagtacagcacatgtctgcagatggcatttatgtataatagatggctgctgcttttttttttttttttttttctctaaatcaggtgtcctgagagattgggaccaagagggagatagaacactggcagttggggttcatgttagggtttcagacacatcaaagacagcatccttctttgttttaagtttataaaatagggttcaataaatacctgtcttatagaatttggacagttttttccacataaagccttccagaagatactaagagctatagattttaataacttaacaaatgtaataacgttctacattgtctttgcaaataggtgtataccccaagtatgaatgataccttattttggatgggacaggatggtgaaaatggccacgatgtttggaaaaaccagttcaggggcaataatttttaatacttattagcaaagtagtcttgaaattattaattttttgtcaaaatcctcccattaaaaaattcttgaagacagcataatttgatttgaatacatcacatttaatagaaatttaattcaccctttcagactttaactcccctccccctattttaattaaatggagggattggcttggattctttctaagctaatgctttgtggtttgatcctgttaaatttattttttaaacaaacagcatattttaatttatttacccaacaaataagcattaaacatgttaatcaagacacaccacctgtcctcagagaacagtaatgggtacatttggtcaacaaataactcaaagtctgaagtactaatgtggttatttatttatttatttatttatttatgtagagatggagtttcgctgttttcgcccaggctggagtgaagtggtgcgctgttagctcgctgcaacctccgctcccgggttcaagcaattctcctgcctcagcttccctagtagctgggattacaggttcgtaccaccacacctggctaatttttgtatttttattagagacggggtttcaccaccttgcccaggctggtctccaactcctgacctcaggtgatccgtcccctctcggcttcccaaagtgctgggattacaagcgtgagccaccacgcttggccttgatgtggtcttatctgctgtcaagctacatgagttggaagctacatgagttggggtggagagttgtcaatgctgtttcaggaatcattgctcctaaaggggagccataagtctttaagtatggatagttttccaggtgaagagctcattcgacggaagtgttcatagtgaaagaaggaaatcagttggtggtctcatttgagtagagtaactgtatatcccttacttaaaatatacaattaactgttggtttattccagcaagtgaaatttttgacttccatttattttctgtgcttttttttttttttgagatggagtttcgctgttgtcgcccaggctggagtgcaatggcgtaatctcggctcactgcaacctcagcctcctgggttcaagtgattctcctgcctcagcctcccaagtagctggaattacaggcatgcaccaccacgcccagctaattttgtatttttagtagagacggggtttctccatgttagtcaggctggtctcgaactcccgacctcaggtgatctgcctgccttggcctcccaaagtgctgggattacaggtgtgagccaccacacccagctctgtgcttttgttccatcaatgttttgttgttgttgattgattctctctctgtcacccagtctggagtgcagtggtgtgatctcagctcattgcaacctccacttcctgggttaaagcaattcttgtgcctcagtctcccatcgtagctgggattacaggcgtgtgtcaccacgcccggctaatttttgtatttttagtagagacggggtttcaccatattggccaggctggtcttgaactcctgacctcaagaaatccgcccaccttggcttcccaaagtgctgggattacaggtgtgagtcacttctcctggcctgttccatcaacttttaaaaatcttctatcactattaagtttaattcttgatttttttttcctttttctcttcttgccctccctgccctttttttttctgcttacgtaaaattcttgattttaaatgatggtccacagctgctgtagtctgacttgtgtcccataagggctgatgactcaaacatcagaattgttgttcagttttaattttcaagatcacttttgagtttgattgcttccctggtttttttttttttttaagttgacaaaattttttccaagctttgtaatgctcagtgtgtgaagcaaatacacaaccatttatgaagtctttaataactaataaaactggaatctacacattgtcatataaattggaaaattagaatatcttgtttgtggagagcattttcaggttatttgacttaacaatgatgttatgagactacatggaagaataattggatcttgagctgtttaaacatgtgctaaatagaaagaaacaaagcttcagaggacctcaggtgacacctggtcctgtcttctgatttttgacagatgagagttttagggatttagataattggcttagtaattgaatcagtgaaacagctactccaggctctttctgctgaattgtaaggggaaatcagtgtctcttgaaatgtttgctgtaaaaaaaaggaagacactattttctgatcagttgtacatttcaaattctaaacatttttttgagcattgttaaacactgtcaagccgtgtggatgtgaaggtgaataagacagaatagtgaataagatagcctttgttgtcacaggagtttgcaagattatctaacatttaggaagtgagacaaatgggcttatgctgtcccctgcaccccagcaaatgtgtgaaatgtccccttgcttgtcactccacttcatcgtccttctgcacgtttaatgctgtccatacatgctgacttcctcctgcttctttctgctagtcataccttttaccatctcagggttcctatattattctgttccctctgcctgaaatacttctgaatattcttcatctccaccccatccccctttttaacctgatctacttctcctctgtcaaatttcatttcatcagagattatgtctatatagcacaccccttaactctagtccctgctgtgaagctcatagttctggtttttttctttatagcacttagtatatattattatgtttgtttgtatgataattacattacttttctcaatagactgtaagctccctgagagcagagactatttttctttactgtgtctcctgcacttagtgtaacctcagtaggtgtttgagtattagaacttttttttgtaaagctacgttgttgctataaatcagagtttagtttatgttttttgttttagagggagtttcactctgttacccaggcgggagtgcaatggtgcacagtcttggctcactgcagcctccacctcccgggttcaagcagttctcctgtctcagcctcccgagtagctgggactacaggtgcacgccactacgcctggctaattttttgtgtgtatttttagtagagacatggtttcaccatattggtcaggctggtctcgaactcctgacctcaagtaatctaccagcctcagcctcccaaagtgctgggattacaggcgtgagccaccatgcccagccagagtttagttttttgtaaagggtcatatagtgaccgtttttggctttgtgggccacacgatctctgtcccaaccctgctaatgcggcaggaaagcagccatagatagacaatatgtaaaggaatgggcatggtccttttccagtgaaactttgtttactaaaacgctaagcaggctataagtttgctgacttctactataaatcatcatcccctgatcttgttggacttgaaagcccttgttatgcaatcttgcaaatcccctcttagggttttttgaaaaatgattttatttttgtatggtagatgttaaagaggtgatttttaaaaagtctgatcttaaagtaatgtaaaatacaatcttaaatatattaattatatatttttagtttctccagtttactagtaggcatatgcttttgttaactttacatttgtatttaagtaaaacatgattcttgatattgatgttaaaataaaaagattggtttggttttgggatagattaaaatgtagattgaaattttacaatgcgtttcattttcaaaaaagactatttttgcaacctgatgcttgaaataccatataatattattttgttcttaagtgacagatgaagaaacattccaggttgctgtttgcagaacttctgtgcaagtaaggagttattacaatgaaaagcaaattcactataagcaccagtgtttatttttcttacttttttctttttttttttttttttcagacagtgttgctctgtcacccaagctggagtgcagaggcatgatctcagctcactgcagccttcgcctcctgggttcaagtgattctcctgcctcagtctcctgagtgggattacaggcttgtgccacctggcccagctaggttttgtatttttagtagagacggggtttcaccatgttgaccaggctgttctcgaactcctgacctcaagtgatctgcccacctcagcctcctaaattgctggggttacaggggtgagccactgcgcccggcctatttttcttttttcttttcttttcttttctttccttttcctttttcttttctttttttttttttttttttttttgagatggagtttcgcttttgttgtccaggttggagtgcagtggagtgatctcagcctcccaaattgctggggttacaggtgtgagccactgcgcctggctgtttttcttttttaacgttgtttgaaagtctagaatcatttttatgtgctagatgagagatttgatctgataaatcaaactcagatgtctgcatctcaagtgtatttgtagaattatttttctgttttctattaatttagattgaatgtcagagtacccattataggtattaaaatgaatattacataagaaaaaataacaacttaaaaatgttcagaattgtttaaataaaaactttagacagacatttagcagaatttaggtgagcattaaaggattcaggcagcattcaaaactggaagaagttcagagagctctgctttagaagcaggcttttataggctgaacgctgtagcaaagtaaaggaattacttgattggctgtagctaggcacttgccttatttggatatgatccagtggaaagtccctagttagaggtttgtttttgattggttaagcttaagtttcattttatgtttacattgggcttcagtttgcttactaggcactggagccagctgtctcagcctaatggctgcccaatttaaaaaaaaaaaaacattaaaatggcatgtagttgtcatcatcagagtaagaaaccaaagaagagaccgtcatgaatgggatcattagatcatggactgacacacatgttcacttaatacccacaagagtgtcttcacacttttttgtcatggatgggacttgttttctgttttttgttttgttttgtttttgatacagtaaaatacttaggagttcttgcaactttctataagttgtttacattttactccaattgctttatcattgtgtgtattttggaggtacagtttttttcctgaaccactctgaaagtggaaatatgcccttttatccctaaatacttaaatgcatatttcctgaaatcaaaggcattttcttacataaccacacataaccacagtacaattatcaaaatcagaaaatgtaataatgataccatactattaacctgattcacagactatattcaggttttataaattatttcaataatgtcttttatagctcttatacctcaatccaattcagtctgtcatcacacactgaatttaactggcatgtctctttcttccttgcctttcccctttcctctttccttttttcttctttcttagagacagggtctcattctggtgcccaggctagggtgcagtggtgcaataatggctcactgcagccttgacctcctggactcaggcaatcccccaacctcagcctcctgaatacttgggaatataggcacatgccattatgcctggctaattttttttactttttgtagagatggagtctcactacgttgctccggctggtctcgaactccttaccttaagtaagccaccttccttggcctcccaaagttttgggattacaaatgtgagccactgcggctctttaatttttcttattctaaaacagttcttcagcctgcctgcctcctcttctcccctcctggtacttttcttttcttgaccattccaattttgaatacagaccagttgttctgtacttagtttgggtttcgttgccgttaccttatgattacattaatgttacgaatttcaggctggaatactatagaagggatgtattctccttaatgcctcatttaaggaggcacataatcagtgtgtctcaatattagtgattggttaatcattgtattaaggtcatgtctgccaggttactccactgcaaaaattactatcctctttgtgattaataagtaatttgttgggtatatttagagatgatgaagttgtcctgtttttcattagttttctattcactagtagtctcagcatctagtggtgattttcttttttctaatttttaatttttttttgtagagacaaggtctcactatgttgcccaagcagattttgaactcctggcctaaagtgattgttccaccttgacctcccagagtgctgacattataagcatgagcagctgcaccctactagtggtaattttctaattccatcattgtttctgcatttacatattggcattctaatgaaggaatgctttcctttcttccttgttgattggttaaaaaaattaaatatggattatgctctaatccattactatcattatttattttgatgcttaaattgttgcacaattccagtggtagtcccttctaactggctttagtgttcttttgacatacccctgtcatttttgagcagtctcttactttcttgcccaaggtgttgcatgcttatcttttttttttttttttttttttttttttgagacagagcctcactctgttgccccggctggagtgcaatggcatggtcttggctcactgcaacctccgcctcctgggttcaagggattcttctgcctcagcctcccaagtagcttggattacaggtgcctaccaccacgcctggctaatttttgtatttttagtagagacgggttttcaccatgttggccaggctggtctcgaactgctgaccttgtgatccgcctgccttggcctcccaaagtgctgggattacaggcgtgagccactgcgcccagctgtgtgcttatcttttactttccctgccctaccagagatcagctatttctccaaggatccttggttttagtagaaaatgtagtttagaaatcaagatctgggtgttcatttatagaaggggtcattgcttctagaacctctcagcaaacagctaggaagtgtatgtatgaaagtgtgtttgcgtgtgtatttctatgtctatatattttttgagagacagggtctcactctgtcacccagggtgaagtgcagtggtgggatcatagttcactgcagcctcaaactcctggtgtcaagcaatactcccacctcagcctctcaggtagctaggactgcgggcatgccccaacacgcctggctaattttgtaattttttgtagaaatgggatcttggtatgttgcccaagctggtctcaaactcctggcctcaagtgatccttccaccttggcctctcaaagtgttgggattacaggcgtgaaccactgtgcccagccacatttaggtcttttatttctctctctttttttttttttctgttttgagacaaaaatcttgctctgtcgcccaagctaaagtgcagtggcgcgatctcggctcaccgcaacctccgcctactgggttcaagtgattcttctgcctaagcctcccaagtagctgggatttcaggtgccagccactacgcctggctaaatttttagtagagacggggtttcaccatgttggccaggctggtcttgagttcttgacctcgtgatccactcgtctcggccttccaaagtgctgggattacaggtgtgagccactgcgcctgggcgcgctctctctttttttttttttttgagactctgtctcactctcgctcaggctggagtgcagtggtgcgatcatggctcactgcaacctccgcctcccaaattcaagcgattctcctgcctcggccaccagagtagctgggattacaggagtgcgccatcttgcccagctaatttttgtggttttagtagagatgaggcttcaccatgttggccaggctggtctcaaaactcctggcctcaagtgagacatcttcctcaatctcccaaggcgctgggactataggtgtgagctgctgtgccaggcccttatttctcttttaatgtataggttctgctcctaactccctccatctccctttttttccttaagaatctggattgcttggactataaagttttccacattctcgactttgctaattgcatcatcatcttgccattaacatgttcctgtgtcccctcaatgttttataaatttgctcaatcgtattgttttactttttttttgggtaaagcatgattcattaggaggcatattaatttccaggtgtctctcgttttataatagtggcaattggtgatcattagattcattttttcattagggatttgcaaaatgatgatattccagatatattattttgtcatttactagttggattatttcaatagagatcaatttttcgccaactgtttgggggggcggcgattcttgaatctttattttagattcgggtacatgtgcagctttgttacatggatgtattgcatagtggtgaggtttgtgctcctagttagcctatcatcgaaataatgaacattgaacccaacacttttctccaactatttgtttaactagatgtacagttcatataggaaagacagatgaaatgcttgattcatcagattttagaatgagtttggttctctagtattctctgaaagataagtaatcaattagtttttttaaataggtattattatgaactcatgatttaaacattttattgtgtttcaatcaattgcagcttctttttttcctttctttttttttttttttttttttctgagatggagtgtcactctgtcacccaggctggagtacaatggggcaatcttggctccaacctctgccttcctggttcaagcgattctcctgcctcagactcctgagtagctggaactataggcatgtgccagcatgcctggctaatttttgtatttttagtagagagagagtttcactatcttggccaggctggtctggaactcctgacctgaggcgatctgcccacttcagcctcccaaggtgctgggattacaggtgtgatccaccactcctggcccaattgtgatttttgttgttgttgttgttgttgagacagggtcttcctctgtcaccagcctggagtgcagtggcatgatcttggctcactgtaacctctgcatcctgggttcaagccattctcctggctcagcctcccaagtagcttggattacaggcgcccaccaccacacccagctaatttttgtattttttagtagaggcggggtttcaccgtgttggctaggatggtcttgatctcctgaccttgtgatccacccaccttggcctcctaaagtgctgggattacaggcgtgagccattgcgcctggccaattgtggtcattttttattgctcctcaaattaccccatctttgttagtgggagcctcttcacattaactctctctgagtccttgggacataactccagaagtgattgatggcctgattgctttctgttatgacaagttttgtacattttctgccctatacctggagttgactattttcctgaagagctctgcttccttttattggaaaatgctatttaggatccataatctgagtgctagaagtgaaagacccaccttgttttcctttttaaataacagtatttatcacctcacatggtttgtatgggtcataattctgaggtgccttagttcgatggtagtggcttggtgtctgctgtcaagatggcttacttacattgtaggcaatttgataccggctattggcaagatgtctcagtctctccccatgtggaaggctcttaggactgcttgagtgtcttcacaacatggtagctggcttccttgagaacaagtgatccaagacagccagcagcatctttggattcattttcttgtcagcagtggggtgtagtgctctagctgtgaattcagacaacctgatgctgacactagctatgtggcattaacttgtttgaacattactttccttagctataactttgagacaataatacctaccttataggccctttaacataggacctttgtagcaatgcagggaactagaatagtctctgacacttagtgagtacacatgacaaacactgaacctgctggtgttactattattaccaccatcactggtatgaaatgaagccctaaaacctagtaattaagttgcccttgacagaaatagccttccttcctatttgtcaaaaattgccatgacagaaatattgtttacagattgcagatatatcccaagtatggtagaaggttaagggttagagaattataaccacacctgtttgactatatatatatatatgcaggggatctttcatgccgaatctgtattcatgtagattttagtataggatatgtgtcatgtaatgtgacccaggaagaagccaagacccccgccttcccctggccatctttttttgcttttgcttttgctttttttttgagacggagtctcgctctgtcaccaggctggagtgcagtggcatgatctcagctcactgcaacctccacctcccgggttcaagcaattctcctgcctcagcctcccgagtagctgggattacaggtgcgtaccaacacgcccagctaatttttgtgtttttagtagagacagggtttcaccatgttggccaggatggtcttgatctcttgagcttgtgatccgcttgcctcggcctccaaaagtgctgggattactggtgtgagccacagtgcctggcctttctttttcttttcttttttaaagatggggtctcactgtgttgcccaggctgatctcaaacgcctgagctcaagcgacctgaccaccttggcctcccaaaattgcccaggctgatctcaaacgcctgagctcaagcgacctgaccaccttggcctcccaaagtgttgggattacaggtgtgagtcactgcacctggctaccaccacccacaatcttttaactttttattttaaaatgtagattcacaggaagttataatgaaaaatgtacagggaggtccgttggacccttcactcaatttgccccagtggtaccattttgtgtaactatagtatggtatcagttgtcaaccttcgatttttatttagcagaaattgactgagcagctattatatgctagctctttgaggtataaaggattaaactctgaccttatgggtttctgtcatctctctggattttcattgttattgttcttaaaatattttttattttggcgactcattgttgacacttatattagcagttattttaatgttaaatattatgttatttctgacatttatatttgctctgttttaaaacaattttgcattgtgtccccatcttccatttataatctttacagcatcagaaccatgttgcctgcattgtcttattttaatcacgtgccagttttgcagtgctaccaagtctggatctgagaggcagcttgtgtgaatcatttacatacatttctgtttatattccccaaattaatttgcaactttatatttttcatccaattatatgttcaaaacatatttttaataattgattttaagaaggaatttgttatattaggatttaaaaactggctcaaaaaacagaagctattaaacaatagcagaaaccagacagtatataggactttaaatggtaattgctaaacatttgaatgttcccaaaaatgtgagtctgtgtgtctctgtgtgtctctacgtgttattccactagggatttgcacagataggttttgcacaatatccttgctgttattgtcagccataaacaaattacacgtatttaacaagttaatgtcagattggccaggagccactgggaggtgtgtacttagtgacatcagctggcaaagagccctggtaacagggagggttggaagggtagtggagagagaggaagcaggagggagggagaaaaagagagagactgactgtatctggggattctggcaaggtgaagagctggtctgtttggcaggaccttcccatctgggatccatctgtgtttccctggaatgggacaggcagctctagtcagtgagaaatcgcagatgtgagagagctgacacatgtccagctaatgaaaggaggaggaaggctggtctccgattgagctttgaagattaggaggagaaaaagaggagctttggaatatctatttcaaataaatttggtgtatttaagaatctggattgtttataatttgggcatttggggtaagtacattttaatatagttttgggggttaaagtgcacaattctctgcctttcaaagctttttacttctttcaaattacgatgatatgaatgtttcttggtatttgatacaagagttcagcctttctactcagttttattttaatgcttcattttatttatgtttctatttttctgttgccaaccttatatttgaatgtcatgcttttttgaatgcaaggtttacttaataattagatgtagtatatgaattctacagctagaaaagtagtcccacaaatatttctgtaaggttttccacgttggattgttctgtgatgtttagagggaatttttttcccctttagtatgcataatacaaataggccatattaaaaagatggctcataaaacgctcttttctattgtcagattttatttcagtatatgcaggcaaattataactaaaagaggttgaagcaaaactaacagcatctcttcgttttagatatatctaacagtttttcatttacattttgctcctatgctgttttcttctgttttcttgctacatataaaataaataacatcaatgaatctgacttgaattgtgagtttggggtagttttgtgatgcaataaattcatgtgcatataactacgtactgtgttctgtagtcctggttagtttgtgatgcctattttagatttttgctatttcttatatataagaaatagagatgggtctcactgtgttgcccagactagtctcttaaacttctaggctcaagtgatccttctgcctcagcttcccaaagtgttgggattgcaggcatgagccactgcacctggccactttttactgtttccatacattgtattcatgtttttgaggccttcgaatctaggcttcctttccatgttctatggaaagaacatgagtttgggagttacacaaactgtgtacccattatttactagttctgtaatctcaagcaagccactgttctctttgaatctctattttgtgtaattcctgactgatgttgttattggggaaatttgtctggcacatagaaagcatacaagttggtttcaagagttctagatgttcactttttttgctgcgatagattcctaaaccccttgcatttttaacttcagctcctgggcaagaatgggtctggcctgtagttctagttttcagggcgcccttcctcttgctgtactcgtctcagattgtctgcatctattctaaatgttctatgctatatttgccaaactataccagaacagaagaactttgaaaaagtcaacaagcaggagtgaggtactgaattgtactgctttgtgacgacactgttgaaattgttccccccactccgcgacctcccgctggaaaattgtttttcccccgtgtattacaagtcacgcaaaaattctaccatttctcaaatagaaactttaaaaaatatttttattccttaaagttcttcagcctttatttatattaattgggtaattaagtggacagtatagtactcttcaatttcttccttcaattttatagtcagatttcttgaggtggaggggacttttttctttttctttcttttttttttttttccgagatggagtctcactctgtcgcgcaggtggagtgcagtggcgcggtctcggctcactgcaacctccacctcccgggttcaagctattctgcctcagcctcccaagtagctgggagtataggcgtgccaccatgcctggctaatttttgtatttttagtagagacgggttttaccatgttggtcaggctggtcttgaactcctgaacttgtgatccgcctgcctcagcctcccaaagtgctgggattaaaggagtgagccaccgcgcctggccctctttttttcttttctcttttcttttctttcttttttttgggacatggtctcaaactctgttgatcaggctagcatgcagaagcatgatcatggctcactacagccttcactcttccggacttcagtgatcctcccaccctggcctcctgagtagctgggaccacaggcacgcaccaccacgcccagctaattttggtagtttttatacaggtggggttttgccatgttgcccaggcttgtctcaaactcctgacctcaagcaatagagccacctcgacctcccaaagtggtgggattgcaggcatgagccaccacgctgacttgaaggagacttttaaaatggaacttttcccaagttttcttttcttttcttttctttttgagacggagtctcgctctgtcacccaggctggagtgcagcggcgcgatctcgactgactgcaagctccacctccccggttcatgctattctcctgcctcagcctccagagtagctgggactacaggcacccgccaccacacccggctaattttttgtatttttagtagagacggtgtttcaccgtgttagccaggatggtctcgatctcctgacctcatgatctgcccgccttggcctcccaaagtgctgggattgtaggtgtgagccactgcgcccggctccaagttttcttttataccaaattgactaaaatgattttgtaaaaatttgggggcatctcttttgataggtgcattgttcaacaagcatctttgggacttttctgaatacttgagaggatatagtgtttatactgaattcacatggtactccttcagtgagaaaacactttccattgtagcctaggagacatgagtggggagaaaaggacttaatgcttttctgtaggatagggcctactatagagggcctgaaaaggggatttcatatgactatgtccatgctaggaatactttggatgctagagtttcaggaaacataataaataagaaaaaatatgcattttaggatgtgaagattcactcactgtaaataaagttgggtgattaaaagtcttgctaggaccagacatttcaggagagtattgcttgctactgaggttataaccaagatacatttgagttgaatactggagaaaatcatgattctttctgaagattatggaagcatcatgagaatcttactactaggaggaaattctcctaaattggcttccagtaatgacccaagcatattttcatagcgagggtccttgttggactggaggcacataatgcaataatgccaataaactggagatgaggataatgacatttaagtggctttgcgggaacatcaaaaaatacatttgagtgaacgaatgtatttaatacacaactggaaaaattcagttggatccgaaagattggttgggtcagttcattgatggttattctaaggctactcagtgctcataagttcccagagatgacctatggacaatattagggttggaaaggatcctttggataatctagtcaaacacattattttatagataaaataggaaagttgagggaaagataatgggatggcaaatagtctccccagcccagagttcaatatcctcctggttgctggctgagcttagactagaattatgttgagtttccaggacacccattttacgaatgttattttgaattgcctgttgtatgtgataatatggtaagggattttttttaaaaggtgaaatctcatagaggagataaagtgtacaaaaagtggctgggcgccagtagctcacacctgtaatcccagcactttgggagaccgaagtgagcggattacttgaagtcaggagttcgagacaagcctggccaacgtggcgaaaccccatctctactaaaaatacaaaaattagccgggcgtggtgacatgtgcctgtaatcccagctactcaggaggctgaggcaggagaatcaattgaacctgggaggcggaagttgcagggagctgagatcatgccactgtactccagcttgggcaacagagcaagactcagtctcaaaaaaaaaaaaagtacaaaagtagtaagtcctgaaaattagcaccaactgtaggaatcagagaaccttcctaaaggaggtcgcgtttgatcagaatttagaaggacaggaaggatttggacttctcatgtttggaaggagcatagtggcaggatggaaaggttccctttcttctagagccttaaattaaactttattaaatgcataattacatagtattcatttctaccatgttttgaagtatgtctagctgttgctgtctttccaaatccaagatcagttgtttacttctgagatacttacctttatgcatgcatagccgtcttttatatgtgtgatttatataccaggaagctgtgatttaaaagattgctaccatgatggactctgtggattgtttaattttccctccaagttcaagtcagtaaataaaggaattagtggtggttgtatcttgcagaaaaacaacatattataactggtgtttgtattttcactggctgatggactttccaaacagcatttgacttttgagaactatatgatgacacagattgatactggggaatttaaaatgcatatggatttaattttcctaaagcatgccaaaacctgaaaaagcaactctttgtgttttgtttaaagcaacagctcgtggaaatcctgttatcgttcaatcctcagcagtttgttatagatgcctggcaaggtgggatgcagttctgtatatgtatacatattatctgcagttgtctctcgtagctggagctctgcagtaaatggagtgtgtacagtagtctccccttagtcgaagtttcgctttccagggtttcagttacctgtggtacagtacgctaagacattctgagagagagaccacattcacataacttttattacagtatattgttataattgttataatgttttattcttgttaatctcttactgtgcctactttgtaaattaaactttttttttttttttttaatttgagacggagcttcactcttgttgcccaggctggagtgcagtggcgtgatctcggctcactgcaacctccgcctctcaggttcaagcaattctcctgtctcagcctcccaagtagctgggattacaggcatgtgccaccacgcccagttaattttttgtatttttagtagagatggggtttcaccatgttggccaggcaggtttcgaacgcctgacctcaggtgatctacccgcttcggcctcccaaagtgctgggattacaggcatgagccaccacgcccagcctgtaaattaaactttatcgtaggtatgtatgtataggagaaaacatagtatatatagggtttggtactgtctggggtttcaggcatccgctgggggtcttggaacgcatctccttcagacaaggcggggactattgtattttcatttgattgtggtagtttggacagatggagagaagacggtgaaagattgtgtgtgggttttgacattaggctgtgtaaccataagctgatttaaccttcacctctaagcctcagttttctcagctgtaaaatgggaataaaaatgagttctaaggatttaattagaaagaaattagcatgatacttcctgcatcagcactcaataagatttctctttccatgtgatttttcccagtcccccaaaaacattgaagtcacaataactaaaagatttacttaaaatgggagtcttggatatttttactgtctcacttgagactgacagggaacccagttccctaactaattctaagtcatgggagaagggtgcgtgtagagaatgctgtagagaatgcggcagtctttaaaaactcaaacctgttgctgtgtggcaagctgttaacatttagggaccttgcaccacttactctgctggaagagctgggggatgggctgctttgagggtgacagatgtgtcctctgctgccggcgggcgcgtgcctgctctgtccctctgctcccagcaccaggtgcagccattgttctggctggtctctcttcatccggcctcgtctgttactctgctctttctagctcattgtttctgtaggaaattagcattaaaaacccatctgaaacccccatgtccctcaactgcaggtgactgttattggccccagctgccacccttgcgcttgattacttccatatgggtctatgcaaagaagtagtagccatttattgatttccaccacaaccccaacctctattactcaaactataataccctgaaatctattagacccccagtaggctgtatagctcagttggcgctacaactgtgatgaacattttacaagcaaaactaattacacccttttccccacccccatcacctcctccctaaatattaaatgtagaaacaccagagtgtcataagtggaatagtaaatcttttaaatgtctggaaatgaatctgtttctgagtagtaaagcttttagactttggatgggattttatggaaaattttagtcactgctttaatatttcatgccacacccataatattcaagcaaatcgtggcccagtgcccctagggtgggggtagggcacacaaaaattttcatcacttgctttttggtttgttaaatttaatccagtgggcagtatgttaggaaaggggcctagtttaaaaggataatatgttttgtgggagaaaacaacatgcagtcattgttaaatgctttaattttgcattattttgttgtttgttctctgtgtttacacaaataattgttctagtttactcattagaataaataccacaatgagaaggtcgatgttttagacttctttcttccttcatcagtaaacaaacttaagtgttccactttggttattgttctaaatcaagattgtaatctcaaacaggtaataagttctcagcttcaaactctagatagaatttcaaggacaatccaaagttgttattgactcctgatgaattgtattgtgaccttgacaaagtcactgccctgtcagtgaagggtattctggtagcctttacaagtcaatagcccaggaaatcaagggggaggtcattgacttttgcctgttgagagtttagcagtgtaacccagttttaaagtaaaatcttgagtttacagcattttaaattaaattatttaataatttggaaaatttaaagtaacaatttcaatgttttaagcttagctgcatagagcttttatcataaggaacatagggccatttctgttggaagaaatgtctttttggctttctttctttatattctatttattttggagtttaaaaaggtactaaagccaggccctatggtgtgtgcctcttgtctcaggtactcagaagcctgaggcaagaggattacttgagcccagtcattcaagacaagcctgggcaacatggccagacctgtaatcccagcagtttgggaggccaaggcgggcgatcacctgaagtcaggagttggagactagcctatccaaaatggtgaagccccatctttactaaaaatacaaagaaactagccaggtgtggtggcacatgcctgtaatcccagctactggggaggctgaggcaggagaatcacttgaacccaggaggcagagtttgcagggagccgagatcatgccactgcactccagcctgggtgacaagagcgagactccatctcaaaaacaaacaaacaaaaaaagatactagaatttgaaaagcccctggcagccaacattttacgtgacagctcctatgaaggcaagcctctaggtagagcaatgtgattatatttagaataggttaggagttgtagtatttgaagagtttttttcagagctttttaatctgctccttcgttttaagcagtggagaaattgaaaggtagggaagtcagtaaaggggaagagttgagatttgaaacagagccttctctgactccaaattaagtgtactttgatttgaagtttggagctagtacatgttgggaatgttgatcagtattgctatagatattgtcgtcttgaggtgagtacatgtgctgttaacccttctttctggtacttaggaagaatgggggtttccttctgtggccttactgattctttcattctgtcattgtacatactgagaaacaaagttaaatagtaaaaggagtttgcagtctaatgtgagactcattttcttttcatctgttttaattttattaagttgtcctctctcattcctagggctaatgccacaatgaaactggaaataagttttcttgcactgtgaatgtgaactgaggtttccacaagcaaactgtgcttctgtctccccaagtagagaagcatggcaaataaccacaagtgctttgtcggggccccaggcttctcacttacctttccccagtcctggctctgttcttcatgtctaaagtaagggaggacaacagacttggtgtgtgtgtgactgaccttctagaaatgttaacttccatctttatcttggagaatgaattgaagtgtttccctgcctttccatccaagggaaccatctctaacaacaaatctttttaagtgggtctggaggggggacagagaattggtgatttgtcttggtaattatgttgttttttggagtcagtttcaaacacttcagtaaaaatgtttaaggctcttcaacttttttggtttgtttcattttaatgtactactttattctattttctcacattttgtacgcacaaatcaatagatactcttaattgaataagtgaaaatagtgggtgagtttaaagatagatgtttcgttttccttattttgatgattacttttaaaattttaatgtgtacttgacataaaatctaatgtcaattcatatatccatttttttctttaagtacagaagtcttagaacacttcaaattcagtaactttttcaatatattaccgctgtctaggattttgtttccattttgtttgttacactcccagccaaaataatagttaccattatttttaaagctattaatttcgatttaccaatatatttattgaattatctggtcactttgcatatttatcacaattttccttctaggttaataattcattcctgccaagtgtatctgttaataattcttggagaatctgtaagtagtacactctttttgctgatctgaagatatctttatttcacctttacttgaatgatagttaaatgtggttagagtgtaaaggttgacagttattttccattagcacttgggagtggtgatttcttttcttgtgttttgtttgtttgtttggtttgtttggtttttgagatggagtctcgctctgtcgcccaggctggagtgcagtggcacaatcccggctcaccataacctccgcctcccaggttcaaacgattctgctgcctcagcctccagagtagctgggactacaggcgcctgccaccacgggcctggctaatttttgcattgttactagagacggggttttgccatgttggccaggctggtcttgaactcctgacttcaggtgatctgccaaccttgtttatatgaggaagtccctcataaattttagaataatatctgtaaagatggtggtagggtattaatgttaataattttggtaattatactgggcttataagtaaacatcctaactcttagcatttacacactgaaatatttaagcataagggagtgtaatgtttccagcttgctctcaagtggtttagataaaaatataggtagatagagaaaaagaaagtgatttttataaatggatgaattaattggtgaatttagctaaatgatattaacagaattatttgaatagtcttgcaaataaaaatgtttctaaatttgaataaaagaaagtactgagcccattaacaaaaaaatatgtatatgaaattaagtgttaatttaggactctctgaagaagtaaattgagctgtgtgctgaataacaataatgaaatagtcggtggatgtcagtgataagaatattccagtgcaaaggctcaatgatgggaatgaactcagtatgttcaaagaatagaaaaatggccgatgtagatataatgtagtggacgaagagaagagggtagagagacaggagacagaagttcatgtagagcttttaaagccagcataaagctttgtaatccaatgaatttggatttcattctgagtgatgggtaaccattgaatagttggggcagtaatgtgatctgatttatattgtataaagatcattcttcctgtcatatagagaaagaattttatagggcatggctggaagcagcaagaccagaagtgaaaagtgacaagtttggcccagctttatggcagtgaatatagtagaggacagatgatttgttatattttagaggaagttaagttttctgaacttgttgatagattgaatgttgagagggagaggggtgttttcaaataattgtcaaatctgtcttccttattattcatccattcatttgaatatttaggtgcctactgtgtgctaggcattattctaggtattggagttacatcaatgagtaaagcaaagcccctgccctcatggagattaaattctagtagaagagacaggcagtaaagatgattaataagtaatatatatgtagcctaaaatgtatgtttatgtatatttaggatgttttttaatgttacaaaaaatgaaagcgctaaggagaaagggaaagggtttaaggagatccaggttagtttgaggagggtagtcaaggaggatcctcactgaaaggtgattattttaagaatgcaaagagatgatggatgtaagtgttcagtactgtatgtgacacattgtttctcagtttttgagtactacttcttcttcttcttctttttttttttcttttgagatggagtctcgctctatcgcccaggctgaagtgcagtggcgtgatcttagctcactgcaacctctgcctcctgggttcaagcaattctactgcctcagcctcccaagtggctgggactacaggcgtgcactaccatgcctggctaatttttatatttttaatagagatagggttttaccatatttgccaggctggcctcgaactcctgacctcgtgatccgcccacctcagcctcccaaagtgctaggattacaggcttgagccaccacacccggccctattattattattattttgacacagggtcttaactcttcacccaggctggagtgcagtggtgccatcatggctcactgcagccttgacttcatgggctcaggtagttgtcccacctcagcctcccgaatagctaggactagaggcatttgccaccatacctggctaatttttcttatttttttttttttgtagaggtggggttttgccatgttgcccaggtgggtctcaaactcctgggctaaagcgatcttcccatgttggctgcccaaagtgctgggattacaggcaagagccaccataccagttcctgtctagatattatgatgaagattgaggatggtagtttttgtggagcacaatcctgactgtacctgtgatgttgcattcatcttttggaacataagcagatcaccaggtgaatggctaaagaatctggaataagcttgaaagaaatacaggtcctggcaaggcaatggaaaggtatgtgtgaaacattcatttctaatagaggactaatttaataacagaaatatactcttccctagaaacaatttgctttaaaggccaggcatggtggctcacgcctgtaatcccagcactttgggaggccaaggcgggtggatcacctgaggttgggagttccagaccagcctgaccaacatggagaaaccccgtctctactaaaaatacagaattagccaggcgtggtggcacatgcctgtaatcccagctactcgggtggctgaggcaggagaatggcttgaacccgggaggcagaggttgcagtgagccgagattgtgccattgcactccagcctgggaaacgagtgaaactccatctcaaaaaaacaaacaaacaaaaactcttataaaaagttgttttctttttaagcagggaagcctgacttcattggcattttgagatggaggcttctgggcaaaagaagaatttcatgggggtattttgagatgagtatgatcaatctagtcaagagatggggaaggtctaagctttgtctcttgtaggtggaatggagaagggcaaagggtttgaattttggttgtgtggtgtgaagaatgattggtcttaaaacagatttaaaatgaaaagattaaactgatcaatgttttttatgcttttaaaaaatgtggctgataaagcgtttttgtgcttttaaagggagcctggatgaataggctttggtactgtatgtattgtattaaacatttggagtggcaaaataatttctaaaatatttctagcaacttcattttcattttatctgcaggatgaaaaagtaaatttggggattgttgattaaattagcaaaccatatggttgtttgcgcagactgactgctatgcgaggtagctgtgttatttttctttcaggatatgctgttgtatctgatgccagtgttctgaaacacttattttctagtcaacagtaggtgaagcaattatttctagtcattatggtttttcttgatgccttaattaatgtcacaatttgtgaatgctttaccctgctgtttaaaattagtttaatattttaaaagattaaatcttcacatttatgtaatgcttcccaacctcttttcacatcatagcatacatagaaagtattaagttctgattggctgtcccaggctgaggaaatcattatctcagtaaactgataatcattcttcataactctctggcgttggtccctggcacacagcttgggaagttctgtcttaatagaaaagatatagaaacctttctgtactgtattgcagttagttaagaggaattaggaaagagttatagagtctttcttaatagggttttttttttcctttttcgctagaagcctaaatctcaccaaattatcgggtgttatactaggaactatggttataagagtgaagagctcaaggaactcacagacagacaggcacagaaacaaatcacctgtggcacaatatgacaaatgacatcacagaggtgtttatttttatttttattttttgagacagagtctcagtctgtcgcccaggctggagtgcagtggcgcgatctcagctcactgcaagctccacctcccgggttcacaccactctcctgcctcagcctcccgagtagctgggactacaggcgccagccaccacgcctggctaatttttttttttttaatgtatttttagtagagacggggtttcaccatgttagccaggatggcctcgatctcctgatctcgtgatccgcccaccttggcctcccaaagtgttgggattacaggcgtgagccaccgcgcctggcctaagaggtgtttataagaagctgtaagagtccaaatgtgggaggttttatttctgtcaaggtgcacttgagtctaccagggaggacttggagttagaccttaaagtaggagtttctaaagtgccagagacagggaaagcagggcattgcaggtggagagcacaacctgttttataggctttctgcctccttaatatctagcagaggtctcatcttaatataaaagtagatactggaacttaggagtttgctctgatggcagacatggatacttgccctgccagagtgcccatctaccttccatttatgttgtttggattcagtctccactatactatagccttatatttgcatggtgcttttaattttcaaagctttttatccaaataacagcccctcagggataggaaataaaagccagctggtagtgtttttatttttatagaggagaaaactgagacatcaccatcatatcagcatttcatttcccagataagaaggtctttttttcatctcttgattgcaaagggtgctgcccaacaggaataacctctcccaattttctgggcacagcccagagtgctgactgaggcagccaccaggagggcgccagcaaggcagacagcatggctgctgatcacagagctaacagctcgacatctgcaggctgcagctgtacatttttgctacagcacatccgtatttctgctcacacttgtgaagaatcacagagtttggaagaatatgagttaaaccgttccaagtgtataagtgtgctccatctctgggagttttattctgtactgggtggagtggtctatgagatcttatagctgctacttttctctgtttatttattgccatatttagtccatcttccctgtcctaattttagttcaatgccaaaaaaagatggagcactccataatagatgaattgagagggtgctgattgtgtcactgaaatgtttgccaaagaaattgtttttctagctgattttgttctgcctccatctttcagtctatttggaaaacacagtagagtacctggttatctttcagagtgtcattgttaaataatcatttcagtaagcagtgatggctgttgatcattttagacttgtgcctatactaagtatttatccatttttctaatatacctggatttttaaaaatattgatggataaaaactttctggattgttgattttgaggaggtataccaagaagagaagggtgatcttggtgtggagccaacatctttgaaatcttggcttatttgttcttactccttaaggcaccccattgccactccttaagcccatgtatttgacagtggggctttttgtcagaagcctctctgattgtcatttggggacttaaatgggctcctacataacagcttctatgcttcaattttctaacttgtccagggtgtgcttcagctgtagactgtgtatttacgttcatatatttgtgaagaaagacaggaactatatagtagaatgtgaagtctctctgaactgtaatcaatgtgttttattaaattcttggtcacaatgtgcaaacttcattgagtcctacaataattaattctttttgcattatttattttgctatagtatggtctctggagctcagcagagctgccatttcttagccatatgacttgggacataatttttgacttctctgagccttagcttctggttaaataaagtggtattggagatggtaccttctactgtcttagtgtcatttaaataagaaaatattttagcaccattctttgcgtgtaataaatattttgttatttctaaatgaatatatgaagatggagagtaatggtagctattactattatagttatttcctgacttgtatttatccttcccagcaagaaagtcttgtcctactcaaatcttgggtaaatatgaaacttgcttcattatcagtgtggattgagaaggtgtgtacggtgttcctgggcatctgaagaaaggcttttaaatcagctttcctttgtggtcagttggtcacaaataacatcaaaatatcaattgttaatattcatatttattttttcctttacagctgactactttagtattggtacacctaattaaaatttttccacctctaaaattttttctagggcaatttatatatgattgaattaatttacattgagtattagtttccttggtttttaaaaatagatccccccaaaatggtaaggagttgagaagttaaggctgtgagcaaatagagaatttgggcctaaagtttaatgtggaaatgagaagatgatttcaattgatttgtagaaagaaccataatgaagggaattttcttaagtaaacttatgtttgtacccatttgctactatttttctcttagagcttttagcactttctccctgtcataaggttgtagagttgccatactctgaggtgtcccacaaggctagcacaacagccctctgcttgtggtgcatacagctatcatccaaaggggccaaccacatgacatggcagtgtatttccagatgtcattctctctgtttggatgacttgggagcttaagaagggtattttctcttgaataggagaaaaattgttactttggcataaggcccactctggcaccattcccacatctgttattgattagaagtgaatgctggtcagtcaggatgcaagagtgctggtccgattatcaagctcagccttcaggatgaaatactgcaggaaatctgaaggatggcataaactggctctacacagtctttaaaaagaccctttcataagctattgtacaaagacctggtgtaaagaaatagcctgagtgatgtctacatgttaagaagatgccgtaacatgtacatgtaggatctattcttagaggggagcagtggaatgggtggtggaatccttatgcaatgatttttaaaatatataataaacatgcacagatactaagtgttcaacccaatgagtgcctttttggtttttttgggggtttttttttgtttttttttttttttaaggaaagcgtctccttctgtcgcccaggctggagtgctgtgattacagacataaaccaccatgcctggtctattcatgtttttaatttttaaatttttattcaattttttttaaaatttagcgatggggtctcactgtattgcccaggctggtctcaaacttctgggctcaagcagtcctccagtctcagcctcccaaagcattgggaatacatacgtaagccactgcacccagcctgttcattttcttaatggtgtcttttgatgggcagaaaactttaattttcgtgaagtctaacttagcagtcttaaaaattttatggtttgtgcttttttgcttaccaccaggtcataaggatattctcctattctttttgtagaaattttatggtccggggtattattttacaacccatcacgaatctttttttttttttttttgtatggagtgagagaggattgaggttaatttgtatctatttggacatcgagttccagcaatatttgctaaatagacttttctttccccattgagttgagttgacacctttattgaaactcactttgtgtttggtggttcgtcctccaaccctgtccttcttttttgagattgctttagctctttggtgtcctgaacatattatacagacatcttggtacatcttggtgtctctctctctctctctcttttttttttttttgagacggagtttctctcttgttgcccaggctggagtgcaatggcacggtctcggctcaccgcaacctctgcctcccatgttcaagcaattctcctgcctcagcttcctgcatagctgggattagaggcatgcaccaccatgtctgactaattttgtattttttttagtagagacggggtttctccatgttggtcaggctggtctcgaactcctgaccttaggtgatccatccgcctcggcctcccaaagtgctaggattatgggtgtgagccactgcgcctggcctcttttttctttttttaatctaatgcagagatattcttgaattttaaaaacttttacaaaattgggaatatacattttaggcgtgtaaatttttaaattttaagtcctaactgtattttaacgttggtagcctattattatcaaaacatagtcattctgtgtaacgcagtaagaaatatctaatagttggttttacttaataaactttactaaataaagccagtatgtactatgtactatgttctggccactggacttggcacttggaatatggtggtgatcaagatgaacgtggccccaactctccagaggcttacaacctaagaggccgaaattggcctcttctgaaacaaaaatagacaaatgatgcatttcaggccttgtgatgtgaacagaaatttttttatattcttcattacgcagcagctgatagcagcatcacaatttgataggggccaggcacggtggttcatgcctataattcagcactttgggaggcccaggtgggcagatcacttgggtccagcaattcgagaccagcctgtgcagtgtggcaataccctgtctctacaaaatacacaaaaaattagccaggcgtggtggtatgtgcctgtagtcccaggctacctaggaggccaaggtgggagaatcaccctgagcccaagaggttgagactgcagtgagcagagatcacaccactgtattccagcctgggtaatggaatgagcccctgtcttttatttatttatttatttttaaaaaggcagactccatttgggtaggatgtatgtgcagtatacagataacattgctgtttgtttttgaatgaaaatgtttcctgaagccatagcatgagtattggaatgagtatatatgtctgccctcccttcccctcccttgccctcccctccccgtcctgtccatccatcccgtccctccttctttccttctttctttcctgtcttgagacagagtttcactctgtcacccaggctggagtgcagtggcgtgatctcggtgcactgaaacctccacctcccatgttcaagtgattctcctgcctcagcctcctgctgggattacaggcacacgccaccacacctggctaatttttgtatttttagtagagatggggtttcaccatgttgatcaggtgggtctcaaactcatgatcttgtgatccacctgccttggcctcccaaagtgctggaatgacaggcatgagccaccaggcccagccatgtctgtcattttctttgttaacctaatttctaaagattactcatcttttaaacttctttgaaacaagttgtttcatacctgtgatttgtactgtaactcaaggttttttgttttttgttctttgtgtgtgtgtgtgtgtgtgtctgtgtgtttgtcgtctttgttgttgttttgttttgtttgaatcctggggaaccagaggtgttagcctatgttttaaaactcacatttggcaatggtatcaacagctgtcacactgaataattgtcatgtcattataagggtttctgttgctcactaatctgtaggtataaatctggattttaaccacatgtgattggtaaaaattagttcttgtgagagattctatgctgtgtaggccatctgttccctattctcaaacccagaatgaaaagttagccttagaatttgcaaatcagtgaactaagaggtatgttataataggaagatgggctgactgaagtctctggagctaagctgggacctgtatgtgggcactgctggcagaaacataagtgtgtgtggataaactcttcattagtggaaaggaatcttagttttcggctgattttcagtggtgggcatgaccccaaacagaatctgagatgatgtaataatcatctgtgatttgattgtacttataagattcagctaaatcttcccttttttgtcccagtctacttgagatgtaccttccttgaacccttattgcccagctacatcatgaactccttgaaggttggaatatcagcttcaagtttgtgtcccaaacacttagtacagtgcttgggtcatgttagccttttgatgatgttgatcaaatgaatcagcagccgggcgcggtggctcacgcctgtaatctcagcactttgggaggctgaggtgggtggatcgtctgaggtcaggcgagaccagcctggccaacatggtgagaccccatctctactaaaaatacaaaattagctgggtgtggtggcacattcctgtaatcccagctacttgggaggctgaggcaggataatcacttgaacctgggaggcagaggttgcagtgagccgagaccacgccattgcactccagcctgggcaacaagagcgaaactctatctcaaaaaaaatgaatcagcaaggtaacttcttgcattaggaatgacagcacaggccgggcgcggtggcgtacacctgtaatcccagcactttgggaggctgaggcaggaagatcacttgaggccaggagttcaagaccagcttggccagcatggcaaaaccccatctctactatgccgggtgcggtgactcacacctgtaatcccagcattttgggaagccaaggcaggcggatcacttgaggtcaggaattcgagactagcctggccaacatggcaaaaccccatctctactaaaaatacaaacattagccaggtgtggtagcacgtgcctgtaatcccagctactcaggagcctgaggcaggagaatcacttgaacccaggaggtggatgttgcagtgaacgaagatcgcaccactgcactccagcctggatgacagagcaagacagtctaaaaaaaaaaaaagaggaaagacagcactaccttttattaaacaacttctttctttccccatattcccttctagttttttcttatacatgtgcatactctttccattttattttcgtgagtatacattatatccagctctttccttttacattatatcaagaccttttctgtgttgctatatatttatctgtcattatttcagtggagaagtagacccagaatgtgcattgtttttattaatatcacatgccattgtttccattagattgtgttaccatctaactatcctttgtacaagaacactattgtatcgatttgaaaaatcaactgaaaaatcagttgttttagtagtcattactacaaagttgtaggtacatgataattgaccttttcccagggccaaaggccaagtcccaagccataaccttgcctggatttcattttctttatctgggtagactgagtatatgactttatagtttaaagttctttgactaatcgttaaccttatttggggagatgaaatgatttttatgaaccagtaatttgaatataatgtatgatgaagttttggggctttttttccctttaaattaaataatttagtaaaattttaaaaaattatcttgtttccaaaaacggataattacatataattgaaaatgaattatttgttgaattggatatatttaagttcttaagtcaacttgtttggatttagatggtgacccaagtctaccagcactgcatttagtaaccatttcattagacagatgctgtctacagggtgtgctgttatattatgcattcatcctcagtacttgactgtcctctgggaggccaagtgtctcaaaatcctgtaagcactttcctgtaccccttctcataccaaccatgccacactgtgaacttgctgtgtatttttccttcttgattgcataccttcaccattgtcatttggtttaagtgattttatttatttatttatttatttgtttgtttgtttgtttgtttatttatttatttgagacagaatcttgctttgttccctaggctggagtgcggtggtatgatcttggctcactgagacctctgcctcccaggttcaagtgattctccttcctcagcctcctgagtagctgggactacaggtgcctgccactacactcagctaactttttgtatttttagtagagatgaggttttgccatgttgtccaggctggtcttgaactcctgacctcaggtgatccacttgcctcagcctcccaaagtgctgggattacaggcgtgagccaccatgctggccagattaagtgacttttttttttctttttttttttttgagacagagtctcactctgtcgcccaggctggaatacagtgatgcgatcttggctcactgcaagctccacctcccaggttcacaccattctcctacctcagcctcccaagtaggtgggactacaggcgcctggctaatttttttggtatttttagtagagacggggtttcaccatgtgtttgccaggatggtctcaatctcctgacctcctgaactgcccgtctcggcctcccaaagtgctgagattacaggcgtgagccaccgcgcccggccttaagtgacatttttaagagtttaagatttttccctcagcccatcaggtaagctctagtcagcttctttagctggcttcttagtagaagtaatagcaataataatatagatgatggtggtcatgatggcaattataaccataatatattttgtaaaatggtgtgcagtttagaacaggattactagcatcatttcctgattacagaacaggttggagacagaggcagacttaattgcttattttatagagcttgagccactgttttggtgtgtttaagcatttactatataccaaaacatgatatcctttaaactaccagtgggattttgacagggtaacttagatgccttttatcatattaccaagttgctgagattgtaacccagggcatttggtctaatttgggagcatgtttccattcatctctgcagctcagatggagaagggctggggtttagggcttctgacctcaaaccttgttttttttctgtcatgcttgcagggtattttaaataccctgtcctgttgttccctcaacccaaactacctgttaaaattttggttttgaaaatgaggtccctatagctagatcatgctgcctgtgtgtgaagaaagactaacatgttaggaatgcgtggcattcaagtaggtgtctaataattcttctggagaaaagcaaatttagtcaaaaagcaaatgaaaatattttataagcaatgtttcaaaatgattcaaggaaattggtatttacctcttatccccatcgtgtcatcagttccattgtcatgttctttgaataccgtgagcatgtgtctattttttaataaataattgtaatcatactacatatatataggaaggtccccccatacagcgttgtattatatgcatttcgccaagtgttgaatgaatgatccttcataattacaatttttaatgcctttacagttcacattgacatgctgttccaccgtttaattaaccattctcttgtggtataaattgctttttcccttgagctgttttcttaaggacagatttccaggagtgaggtcacacagtcaaacattatgaacatttttctagcagagaaattattttttaacctcactaattgaatgttggtaccttgaaatacatttatttctgtgctttttgtacctagtacattagtaattggatactggaactaatggaagcgaacaagcatgtagataatctagaaagcattatagtcttaactggaaatacataattattttctctcaaaattcaccatcccattttgttatgctttggcagagcaatctagaactatggcagagtgatggttgaggaaatgtggggaaatttatattaaaaccttagccgtggtaaattgaaagttaacttttgaagcaaagcttaactgtagaagaaaaatagtgattatttctcatgtttgttgctgaattctaggttttattcttctaccttctttgcatatatctgtctctaaaaaggtagctaattaatgtgttatggtaatttacagtatgcaaaaggactgccagtgcagatgtgatctgatcaatattgtgattattatcattattatcactgggttttcttgtttgtttttttgtttgttttgttttttgagacggagtcttcctctgtcacccaggctggagtgcagtggcacaatatcagctcattgcaacctctgcctcccaggttcaagtgattcttgtgcctcagcctcctgagtagctgggactacagggacggggtttcactgtgttgttcaggctggtcttaactcctgacctcatgatccgctcgcctcagcctcccaaagtgctgggattacaggggtgagccaccgcgcccagcctattatcattgttatctcggttatagacataggaaaactgaggttcctgttgatattattgccaaaacaatgctcttgatctcattctatctttctctgaggttttaagcagaacctggttgtatgtgagccatttatattctatagcagatttttgcattggctgtgagttcaaaatagataaaaattttaagattgcttcaaagtcaagagattctatataatcaaaaatacttcttggttaaagcataaagggccaaggtgacgtgtttggaaagtatagatagaaggctctgaattagggaaaagtcctgtaattccacagaggtatgtattttgacccttaatttctcttttccttgaaggttcataattaaagcacagaaattcagaattgtcatagtttggaagctatgaacttgagtgatagctttctcaaaatatattggagagtttcatagaattgtctctacctaactctgaacttcactatttattttattttatcttatttaattttatttttgagttagggtcttactctgtcacccaggctggagtgcaatagtgtgatcacggctcactgcagccacaaccacccaggctccagtgattctgcaacctaaacttcccgagtagctgggactacaggcaccccccaccatgcctggcgaattcgatggcatcttttttagagacgaggtctccctatgttgtccaggctgttctcaaactcctgagctcaggcaatcctcctgccttggcctcccaaagtgctgggattacaggcgtgagccacggcacccaggtttgttttttatttttttgttttgttttgttttgttttgttttgagatggagtcctgctctgtcgccaggctggagtgcagtggcacgatctcggctcactgcaacctgtgcctcctgggttcaagtgattctcctgcctcagcctcccgagtagctgggactacaggcgcctgccacaacgcccggctaatttttcatgtttttggtagagacaggctttcaccgtgttagccaggatggtcttgatcttctgacctcgtgatccgccccccttggcctcccaaagggctgggattacaggcgtgagccaccgcgtctggccaatttttgtacttttagtagagacagggtttcaccatgttggccaggatggtctcaatctcctgacctcatgatccgcctgcctcagcctcccaaagtgctgggattacaggcatgagccactgcgtccagccccgtacccagttttaattatattttcttaactggacctatgtggaaaagaggttgtatgcttccaagacaaaaattgaattatttcacatgtatttccttttaacttgttatgtctgggctgttttggcatttaaagccattaatctcaactcatgatttctgtcccaaggaaaatgagagtcagatgttcacatctggaccatttgtttcattcaagtagttgaaattgcattagaaaattttgatagtgataaagtcaagaatttagaatgaatcattgaatcctcccattgaaagggaagatcaaaacctccaactttatgtagaactatagactgagagaactattactttttgttgatttttcttaaataacattactgaggtatgattgacatgttaaaaagctgtacatatttaacatatacacctccatgcatttgggaataagtacacccctgtgaagccatcaacacaaaagtttcctcttgacccctttattattattttttgtgtatggtatgtagctattttaaagtattgttagtctttgttttaactttgttgaagtgttaattaaaatgatgaacttgcagaagaaaaagtgaacattttaaactattttttataaatagaatagaaacaggtgcaaatgaagaaatatatatatataaatatatatagatcaacaaatgaataatgaacaaatatatatgttaatgtagcatatattaatataatatatatgttaaccacaaaagtaccatggccattcagctcgtgatatgtatttctttcttttacctttatttttggcctgtttgaaagatttatgctacattatattttcctttattccttagattactttaaagaacaacactataattaagagcagtacaccctaaccaagtaaggttgatcacacaatggcaaggatagttcaacattaagaagctgaaaagggctgggcatggtggctcacgcctgtaatcccagcactttgggaagctgagccaggtgtatcacttgaggtcaagagttcgagaccagcttgaccaacatgatgaaaccccgtctctagtaaaaatgcaaaaattagccaggcatggtggcaagtgcctgtaatgccagttactctctgaggcaggagaatcacttgaatccaggaggcagaggttgcagtgagccatgatcgcgccactgcactccagcctggaggacagagtgagacttcccctcaaaaataaaaataaaaataaaaacaagaagctgaaaggaggaaaaaaaacccatttccataaatacatcccttcccctaaaaaaatgcatttgattaagctgaagacctatttctaataaaaacaagtaaaaagcaagtttgtggtaagtagaaacttcaaggttatacatgcaaaatgtggcttaaactagagctgcaacataaaagtggtgaagaacagcagaggacagttggagctgtgggagatgcacaaatgaatgcctctggcatggagcttcagggttgaaaatcaaacactagaagtccagccaggcacagagagcagccagttgcagaggggacatctccctttgtctttatctgttgtggagatgtttggtagtcccttacccccaatgcattgtaataaagcactccatttgtatatgcatcttaatagtcctcaatgatttaggcccacaaaatgatcagttaagagagttacctttattttgtttactttcaaaaaaataagaataaacccaaactcaattcttaatttctcagcctgaacagtgtgaggtcatagttgtccagatttctctggaaacgagtaaagatgaattcgtttctttgtcatgggtctgtactataggttgttctctttttatttcatttgattgtaaacagcaactctggcagctgggcaatattgaatgattgctgtaaacaaggaaacagactttgaggaggaaatatccccactatcagagagctaacagagcctcaatttcaatcctgatctgtctgaatccagccactgcctcatacccacaccagagctgttcaattgaaatataatgtaagcaacaaatagaggccacatatgtaattttaaatattcttgtaaccttattttttaaaaaagaaacaggtgacattccttttgataatatgtttaatatactaagaaatttcaatatataatcattataaaattattaatgagcttgtttacattcctttccttagtactgtttgaaccttggggtctggcatggtggctcacgcctgtaatctcagtgctttgtgaggccaaggtggcaggatcacttgaggccaggagtttgagaccagctagtgagaccctgtctctaaaaaaaaaaatagaaaaattagctggacatgttggcatgcacctatagttccagctacttgggaggctgaggtgggaggatctcttgaacccaggaggttcaggctgcagtgagcctaggttatgtgactgctcttccagcttggacgatgctgtctcatctttttttacaaaaaaaaaaaaaaaatctgcaatccttttttcctgtgcacaaacagcttccagaaaatagttaaaagaaaccatcaaaccctaaggtaattttttttaagtacctgttggcccaaacagagggcttaattagcggcaactcttagaaaccagattgcgttaaacacatctagctttgtttttttttcttggcccccacaaaggctatgcgcatgccccaggaatatacttcttctttgattgggcacaataagattgttttcttcaaatatttgagagtggtaggaccccagaagaactcttaccaactgatggtgagtgccaagatcttctcatttatctggcagtggcatattccatctctgcagcaaggtaaagccctgggtgctagaagttccttcacagaacctaggtgtcagccagtcatggatattgtcctgtggcttcccataaagaaagctaaatctttgcttcgtgctactcctgagcatgcagttttgatttttgtggttctccatctcaaaacaaaagctgatgggctgactgggcctttctttgcgctgggggaatattaaaaactcggtttttcaaatattaaggtacatggagccaggtggaacccaggctcttttaaagattgatgagggcaggtgcagtggctctcgcttgtaatccgagcactttgggaggccgaggcaggcagatcacttgagaccagaagtttgagaccagcctggccaacatggtgaaaccccatctctactaaaaagaaaataaaaatttgccgggtgtggtggcaggcatctgttaattccagctacttgggaggctgaggcaggagaatcacttgaacccgggaggcagaagttgcagtgagccgagatcacaccattgcactccagcctgggcaacaagagtgaaactccctctcaaaaaaaaaagtactgatgaatagctgggcatggtggctcacacctataattccagtgctttgggagcccaagacaggtggatcacttgaggccggaagttcgagaccagcctggccaacatggtgaaaacccatttctacttaaaatagaaaaaagtagtagtccctgctgtagtcccagctactggggaggctgagacacaagaattgcttgaacccgggaggccgaggttgaagtgagccgagatcccactactgcactccagcctgagcaacagagtaaatctcaaaaaaaaaaaaaaaaaagaaaaaaatgatgaataaatatgtacaaaaagaaaagaaaaatatttgtcacatccaagttaactgaggatggcaatgtaattaaaaagaatggtttgaactcacaattggctttgtggttaccttactacttgaaagacgggactgggcacatataccatttcattggacaaacttatttttacttaatagaatataattaaaatgcaaaagttaatagcacattaaagtttaatagttttctttgagacagagacattctctgctctcttttgctcctcagactggtcttcgtagtcttcaggttgctaaaatctgatactttcccaagtccattctcatgaacaattctacatcccaattgtggcggggtgggaggggggggcctcctgtaagtcatggtcattctgtgttcatgctgtctccatttccaaaaacgctccagaatctctagatatatttaaatcttccccaacacacttggtccaacatgttgcttctgttttcattgtctgtcaccatgcctagggcacagcaaacaagagtagtggattgataacaagtgttagttgatgaacatgaaaaaaacgacataggccgggcccagtggctcatgcctgttatctcagcactttgggaggctgaggtgggcggatcacgtgatatcaggagtttgagaccagcctgaccaacatggggaaaccccatctctactgaaaatacaaaaattagccaggcatcgtggcacgcgtctgtaatcccagctactgtggaggctgaggcaggagaattgctggaacctgggaggcggaggttgcagtgagccaagatcatgtcactgcactccagcctgggtgacaagaacaaaactctgtctcaaaaaaaattttatatatatatatatataattatgtaaaaattatatatataattatgtaaaaattatatataattatgtaaatatatatataaaattatgctatgtagttctgttaatgcatgatattataaaagcacagttgtaaaaaggttacatttactctaattctaggccacagactattcagttagtcctaaaaattcatgcaacatcgccaggcattgtagcacatccctgtagtcccagttacttgggaggctgaggatcacttgagcccaagagtttgaggtcagccttggtaacaaagccagacctagtgtcttcgagaaaaaaaatacaaaattcatgcaacattacttgacactagggagactaagtaagtatgaagatggagttatatgaatgggtcactgccacttaaaaaaacccctcaaaaatacatgaactattaatgagttgtagtgcatataaggaagacagaataatgtcttatatatcatgactccattaacctctataaagaagctgaatatctacatcttaaaattgtagactaatggagacattattttgtttatattaactctctacctaggcttttccattgtaaagaagctatatttatctagatccatcctcccccatacacacagagctgtttttctttcacattgaaaaattatgaccaggcaccctggctcatgcctgtaatcctaatagttgtgggaggccaaggcaggcagatcacttgaggccaggagttggagaccagcctggccaacaaggtgaaaccccatcactactaaaaatgcaaaaattagctgagcttggtggcatgtgcctgtaatcccagctactcaggaggctgaggcaggagaattgcttgaacccaggaggcaaaggttgcagtgagccgagattgtgccactgcaccccaacctgggcgacagtgagattccgtctcaaaaacaaaaaacaaaaaaaacctattacataataaactgatttgcaaatctcttgactggattttttttttttttttttttttgagacagagtctcactgtgtttcccaggctgtgcagtgacatggtctcagctcactgcaaccttcgcctcctgggttcaagtgattctccagtgtcagcctcccgagtagctgggattacaggcacctgccaccacgcctggctaatttttgtattttcactagagacggggttttgccatgttggccaggctggtctcgagctcctgacatcaggtgatctgcctgcctccgcctcccaaagtgctggtattacaggcatgagccaacacgcccaaccttctgactggtttttaatacaagatagctagatttttatatctgcttctgcattaatcatgtaatctctgtaaaaagctaccattcactcatgaaagagtaaaaaggataaatgacctcttcttgctacgattatgaaaattgttttgacctttccccttctgtccacacatatcccaaagggtctccagggcccccaacggtcccaggaccatattttgagaactgctgagtagatcatggcattcaagccaaggtaagtttatgttttattgtaagagcaataggaagccattagaagagttcaggtctgtgggaagatctgttttaggttttaaatcagcactttggatactacgtgatgaatggactgaaggggttaaaagcagaagcagaaagaatagttaggaggcagatgaagcagtccaggtgagagatgacagtggctaaattctagcaatagagatgggagacatgacatactgtgacatatttaagagctggactgtcagaatttactgctatatttctttcttttctttttttttgagacggagtctcactctgttgcccaggctggagtgcagtggcgcaacctcggctcactgcaacctctgcctcctgggttggagcaattctcttgcctcagcctcccgagtagctgggactacaggcgtctgccaccacacctgtctaatttttatgtttttagtagagacagggtttcactgtgttagccggaatggtctcgatctcttgacctcgtgatcctcctgcctcggcctcccaaagtgctgggattacaggtgtgagccaccgagcccggcctactgctagatttcctctagaaggttctgtgttccgcagacatttagcacagatgtatcaaatgctggaacccaagagacctggctttttgaatcgtaggaaagccattaactagctgtgtgagaaattgatagcgtttttccctgtctcccgaaaaaaaagtgaggtttatttttggccaagaagactaaagttagctgattctccatcagtctcagattctctgagttctctgactttggctgcgtatgtgtggcccaggcagtaatgtgacacacctttaagtggttgggattcagtcgattttgattgtggtaggggtggcttccatacaaaggcaagatgctaatcaaatttaatttaagtcttttctgttcatgtgagaaatactaagctggtggagacctgaaacagatggtgtgcagttggagtagataactatattattctaaataaatatttgctggagctgggaagcaacaatccatatttcattttttccctatttacattttcaggtcagctgtgttgctactgtttttaacttgcattaaggttatcaacagacttggcaattacaatatatctttaaatgttgaaataattagcattggaagagaccctcagcacgtagtgctgtaatgattcttaatgcatttctggtggatagctgtctaataatatcttacacttgaaaaaattttttttttgagtcggagtctcactttgttgcccaggctggagtgcagtggcccaatcccggctcactgcaacctctgcctcctgggttcatgtgattctccagtctcagcctcctgagtagctgggactacaggcgcacaccaccatgcccagctgatttttctatttttagtagagacggggtttcaccacgttggccaggatggtctcgatctcttgaccttgtgatccgcccacctcggcctcccaaagtgctgggattacaggcatgagccactgtgcctagcttaaaaatcttatacggtacttgttttttaattttcattttttttttaatttattttttttgagagcgggccttgctctgtcacccaggctgaagtgcagtggcacaatctcggctcactacaacctctgcctcccaggctcaggcaatcctcccaaggagctgggactataggtgtacgccaccactcccagctaaatttttgtatgttttgtagagatcaggttttgccatgttggccaggctggtcttgtacttctgagctgactcgatccacctgcctcagcctcccaaagtgctgggattacagacgtgaaccaccatgcctggcctacagcactttttaatctgttactttatttgccttttaacacctcccttcctctgttttacaaatgaagaaaccaaggctctggcatgacttgtccagggttccacagtagctgataaattggcagaaaaatcaggattcacagtcacagtttcatgcccagttttctttcttccacaatagcctacctttgactattcaagaatataaatctctagctggtctggaatttggctgttttgccaaactgaccttttcatctcatcttttgctgcatacagctttttatatttactgtatattctgtttcagctaagagatggtcttaaattgagggagtaatgaaaattttatattaactctttcctggcttaaggtgctgtagccactgtatctgtctcagttaagttctggggcgagatctgtgtgcagtctcttaaatgttaatatattctttgttacacataatatacttgttctcaccttcattgtacctgtattcttaatgatactttgatgaaagcaggttttcaaataagtaggtttaaaaaggcattttattaatcactggtctaatcattataataacctaaacagctagcatgtattcctatgctctttgtatatttattcttgaaattcacagtgcttacagcccggtagattatactctttacttggcttctggtttttccccttatttccttggcttttctttttcagtctctttttttagtttcttgtctttcatgatctctaagagtggaaatacctgcagatctgtacccacttccagtaagatacctgttctcaggctttccgtagaatctatatgccattatttgaaaatatttcatcacaacttcagactttcccaccccaggcctcagctccacacttttatatccagctgcttatccagcatttctgttagaatatctactgagcattttaaaggtaatcctgatcttcagttgctctttccccattttcctttaccagttcctccttcttagtaaatggtaacttcatccttccagttgcttaggctaaaaacctcaaaattgtttcttgacctctgttttttttttttttttttctttctttttttcagtctcatctgtcaaccaggctagagtacagtggcacaatcacagctcactgcagcctgaaactccagggctgaaggaatcctcctgtctgagcctccaaagcagctggaattataggcaagcactctcacacctggctaatttttttttggttttaattttgtggagccggggtcttgccatcttgtccaggctggtctcaaactctggactcaagccatcctcccaccctcagcctcacaaagtgctgggattagagatatgagccactgtacccggccttttgacctctattttgtatttattttttatttatttactgctgtcacctcagtagtagaagacttagtagttactcgaataattttgaataaatagatgagaaaattctaagattcaatttaggaaaagttactcaaattccttatttaactgcattccactacctgggggttatgttaagacaggggtctccaatcctcaggctgcataccggtatggatctgtgacctgttaggaaccgtgtggcacagcaagtggtgagccagtgcattaccgcctgacctctgcctcctgccagatcagccatggcattagattctcattaggagggcaatccctgttgttaactggacatgtgagggatctaggttgtgcactccttatgagaatctaatgcctgatgatctgaggtggaacagtttcatcctgaaaccactccctaccccacccccagttagtggagtgcaatggcacgatctcagctcactgcaacctccttttgtagttcttcggtaggtacatggcctcccaagtagctgggaccacaggtgcatgccactgtgcccagctaattcttttattttttgaaaagacagggtctcatatcggggaatctgccccaatattcacgtaggttcttttctattttcctttagcatcggccagcttgagaaataaagggacagagtacaaaagagagaaattttaaagctgggcgtccaggggagacatcatatgtcggtaggttccatgatgccccacaagccgcaaaaaccagcaagtttttattagggagtttcaaaaggggagggagtgtgcgaatacgtgtgggtcacagacatcaagtactttacaaggtaatagaatatcacaaggcaagtggaggcagggcaagatcacaggaccacaggaccaggcaaaattaaaattgctgatgaagttagcaccattgtcattgataacatcttatcagaagacagggttttgagataaaccggtctgaccaaaatttattaggcgggaatttcctcttcctaataagcctgggagcactatgggagactggggtctatttcacccctgcagtctcgaccataagagacaggcgcacctaggggggccgtttataagcctatacatccaggcgcgtattctctttcccagggatgttccatgctgagaaaaagaattcagtgatatttctcccatttgcttttgaaaggagagaaatatggctctgttctgcctggctcatcagcggtcagagtttaaggttatctctcttattccctgaacaattgctgttatcctgttcttttttcaaggtgcccacatttcgtattgctcaaacacacctgctgtacaatttgtgcagttaatgcaattattacagagtcctgaggcgatatacatcctcctcagctgacaggattaagagattaaagtaaagacaggcataggaaatcacaagagtattgattggggaagtgataagtgtccataaaatctttacaatttatgtttagagattgcagtaaagacaggcataagaaataaaagtattaatttggggaactaataaatgtccatgaaatcttcacaatccaccttcttctgccatggcttcagccggtccctccgtttggggtccctgacttcccgcagcagtctcacttcattgcccaggctggttttccagctttttaatcagttatagcagaagtcagtaaactgtggcccactgtcggccaggcatggtggcttacgcctgtaatcccagcactttgggaggccgaggcaggtggattgcctgagctcaggagttcgagaccagcctgggcagcagggtgaaactccatctctactaaaatacaaaaaaattagctgggctcagtggcatgtgcctgtagtcccagctacttgggaagctgaggcaggagaattgcttgaacccaggaggcggaggttgcagtgaacagagatggcgccactgcaatacagcctgggcgacagtgagactctgtctcaagagaaaaaaaaaacctgtggcccactgtccatttttgtgaataaagattgattacaacacagccaagcccatttatttgtatattgtctatagtgtgctacaatagagcaaaaaaatatttactgtcttgcctttggcaggaaaagtttcctgattcctgagctataataatgataaattaattttccagtatatgtataaacatggaatgtaaaaaatttattttttctatcagtgttggtacatgttaaagtattgattttgttttaattgtgctccatcttctatcttcaaaggtccttgtaaaatactttctggtaatttcccttttttttttttttgagacggagccttactctgttgcccaggctgtagtgcaatgaatggcatgatcttggctcaccgcaacctccacctcccaggttcaagtgattcttctgccagccatagcctcctgagtagctgggtttacaggtgcccaccaccatgcctggctaattttttgtatttttagtagaaacggggtttcaccatgttggccaggctggtcttgaactcctgacctcaggtgatccacccacctcaacctcccaaagtgctgggattacaggcgtgagccactgtgcccagcctctggtaatttctttgagtccttatgtctccatttttgttgaatgataaattgtttgtcattataaacagttgtttctggccatctcggcatatgaagcctgcgtgttattaggaagttggatgtgttgtcagatttgtggcagagttacaaagatggtaaatgctcatccttaagcatgtactatgtccataatcagtttagccaactttataaggctataaatgtaacagtaattttgatgtttcttcctccatctttagcaagttagaattatcacttttggaaagtttttttttttttttttttttttttttttgtgatggagtcttgctgttttccaggctggagtgcagtggcaccatctcaactaactgcaacctccacctcctgggttcaagcagttcttctgcctcagcctcctgagcagctgggattacagacgcctgccaccatgcccagctaatttttgtttagtagagatggggtttcaccatgttggccaggctcgtcttgaactcctgacctcaggtgatctgcctgcattggcctcccaacgtgctgggattacaggtatgagccactgcacccggcctggaaattcttaccatatgacaattacacattcagaacatttacctatgcttggcagtgattgaagagaggctatggtccaggaaatcttttccctgatttttccttcagctgtgataccacctcttgggggcactattcaaactatatcccatgtgctacctggagagcccatgtagcctttccagcaaacaccttaacattgtgttaagacttgcctggccgtcgtacatggtaatgtttctatttctttattttcccagtactgtatgtctgtctttcccataagtgaggtccctccctaccttcatctctgaacttccctaaggcctggcaaatccaggacagtcaagtagattgggatctggatcctcaaaatccaggaccaaattattggaaataatccaattgttcattgacaagggattgtttaaatgaactatggtacctcctcaaagtgtattatcatattgttttttaaaattgtggaattaagaattccaggacatattgtgatattataaaacacaataatagaaccaaaaaaaaaaaggaacattataatttgtatgtggtgtagattagttgtctattcctgcataacaaaccatgtcagaacttcatggcctaaaatgataagcctccccgctcccttctgttagtctaatccgcccacctcagtctcccaaagtcttgggattacaggcaggagccacccacgcccagcctgagagtctgatttttgttttttttgtgggttttttattgttgttgttgttttttgtttgtttgtttttagacagagtctcgctctgtcgcccagactggagtgcagtggtgcggtcttggcttattgcagcctctgcctctcgtgttcaagcggttctcctgcctcagcctcctgagtagctgggattacaggtgtgtgccaccacgcccaactcatttttgtatttttagtagagacagggtttcaccctgttggccaggctgatcttgaactcctggcctcaggtgatccgcccgcctcagcttcccaaagcgctgggattacaggcatgagccaccgtgctcagcctggagtctgatttttttataaagcaatggatttaatggcttccttggccagcttctttggaatgatcagtgttcctgtcattataggaaagatctctatatggatctttatagatagatctaatatagaaagatctatattctgcatattttctcagtcatgataaacaggaacacttgaccagatcttctaccccacacagcatagataacatctcaaactcggtaaactgttattctaatagatttttttttttttgagacagggtctcaccctgtcactcaggctggagcacagtggtgtgatcacagctcactgcagcctcgacctcctggactcaggtgatcctcccaccccagcctaatgagtagccgggaccacaggcatgcgccaccacatccagctaattttttttgttgtttttggagagatgaggtctccctgtgttgcccagcctgttctcaaactctgggcttatcctcgtgtctagcaattctcccgtctcaaggtggtttggattacaggcatgtgccatcatgcccaaccataattctaatatattttaaaatatgattcaagtaaaccatgtgagagtatctgctgtatacccaccattgttatgtccattatggtacccttcatataaccctgtgttgaaatatccccagggacagataaagaaaaccactgtcacacaactagggagtgatggagcattcttcacatcaggctcaccttttgcctcaacatgctttctccttgagacctaaatttttcttctttccaattgcttgggagtagcctttccctttagataacctcattattttcttatctcgtatttacacctctgctctctgccagtctctgattaaaaaaaaaaaaaaaactcaaaagcaatttataatgatttgtaaatgcccttgattgtgggcagtttatcatggaagattcttctcaagtagcacatttctgggatgtcagtcagtaatacagtggttcccccttacccacgtggaatatgttccaagacctccggtggatgcctgaaaccatgggaagtattgaaccctacatacattccttttggactgtaactgagcctatgagatgcaacagcaaaatgagcacaaacgtctttttccttcttacagtagatgtcagcaacctcagcataggaattttttctttccttacgaagtcaagaacttctgccttttcacttagtactttacagcttcactttggtgtgtccgaattgccagcatcactcctcttttactttggggccattattaactaataatcagggttacttgaccacaagcactgcaaaaccatgacagttcatctgatggtaaccgagatggctactaagtgacttatggtcgggtagtgtatactctggacaaagggatgattcacatcccaggtgggatggtgtgagatttcatcacactattcagtacggtgctcaatttaaaacttatgaattgtttatttctgaaattttccatttgatatttttggactttgggtgactgtaggtaactgaaaccgtggaaactgaaactgcagataagaggaagactgctgggtgttcagtgttactttcctgtggagctacaggatagttctactctttagtttcatctttgattctttaaattcctatgtaggaaaaaatatcactgctatcacacagagaactgtttattactttattctttcatctgttttctgttttcaggatatccttagcaaattgcacacagtgaagaaattattcagacatacttttccattttgactcatcaagttctttggcttcccatggtttaggtgttgaaccataagtcattttggaaatgcatgctgtcatatctgggttttattttttaatatatacatacatatatatgcacacatgcatttatttttaatacacgtatacaaatatattcagaataatcaaaacacaaactcatagggtgactaaattgtcagttactttgaatttgaaattgagttggacccttatgacaaaaccaagggttattttgacttcctgggactaaatctttatggctgtttgatatgctaagcaatggtgtttatggacttaagccacaattgagggaaaagaatttcttcttcaactctatttaaggttctccaagatagaagagagttcaatatatggttgattctttaatgggatccagctagaatatagcacataactatcattttcataaaaattcaaaaaggaagtcaccataactaggatgacataaaggcatgtcatagccttcttcctacagggacttactataatcctgtgaccccaggcagagggttaaaatgcctactttggaacataccctttcccatcatctgagcaactgctgaatttgtcaccttgtaaaccacttggatagatctcactccatgaagggcattcatgccacccagcttccatcaaaaatgccactttacattgtgcttggtgattttgcagctattaattcttggatcattccatacattatctctgagtttccatggataaattgttgatagtatacctattttccacagaaaacagatgttaatattaacttggtcaaggtcacatacctagttaatagtatgtccagaatttgacaccaggatttctatcttctaatcatcattcctgttaattaagcaccttctgtataccttgcagtgatttaggcatcatctttaatcattacatgtttcctgacaggtaggtcttactgtcactcattttacatatgttgaaaatgaggcctagaaaggtgaaatgaattggtgaaattcacttgcattgtaacagaatgagaattcacacggaatctctcagtcttcatacctgtgctttttctgcttcattcacttgaaacatgaagaaacactagtgttgtaggttttgggtggtgaaatgaaaagtatcaatctgtaaacagttctctagtggctgggtttggcccactatcaaagcttttggttggtaagagcacagagttcagcgttctgcatttgggctgctctaacttttttattctgccaagtgctgactgttaaaactcatctcactgctaagccttcctcaagtctttggcacccttgctatagagccaggtggtctgaagaaaagctccctctaggttgttgcacactgtacacaacacattacagtgcgagacaactgtcagttccttcctttccttctcccctacccttccagaaagctgggccccagatggaagagctggaaatgtgtcaactgttctctgaagggcattgagaaaatactgtcaggaagaaaaggcaagcgcaacagctcattagtccactaatcagacaggacgaccatcaatttcacaaagaaaatgtcctgaacagagaaatgggaagggctggcagagtgttgcccacatggttctgagaactgcacatttttgtcaggggatttgtaacttgggggcattgctttcttgattgactttattatatccctttcccaagtgtggccactgcaaactgaagcataaaaatggtatttggagatacttttctacaaataccattgtgtcccatcaatgcacaaaaatgttccttgttgccaggatcgtgaacactcttgtatgtattgtctttatagctgtgctctcacagaaggaaaacttggactttaccttcttatttgagcctttgctccccattttttacactttaatttgaattcagcagttattggagaatgaatggctggtacttaagtgaaaagcttagaattactgtgaggaacatagctcaatttaaaggtgattatggtaaccctggtcgtattattaactaagtatgtaacaagttctctttgatagggaaaaataacttgttagatatattagaatattactcattggtatcaagtctgattcctgttagctcagacctacctaattgcagcatcatgaagtttatctaatttatctttctggaattttgttgccatttagtattatcaaacaactgcctattattaattgttcccatagatgaagtagcctctgcttcatgtagactcagctctacttttcatctttttgaacaatgtatagcatgaatgacatttacatgtttgaggtcagagaggttgactccctcttttttcctacttgatgtagttgatatgtatatatataatttagtacatcattattaatggtgatttttttttttttaagacagagtcgctctgtcacccaggctagagtgcagtggcatgatcttggctcactgcaacctccgcctcccaggttcaagcgattctcttgcctcagcctcctgagtaactgggactacaggtgcccaccaccacacccagctaatttttatatttttagtagagacagggtttcaccatgttggccaggctgatctcaaactcctgaccttaggtgatccacccgcctcagcctcccaaagtgctaggtttacaggcatgagccaccgtgcccagcctattaatattgatttatatataactgattgattttcttttcatgtcttgcagttgaggcctaagtctagatagttcccatgttagctttttcacccctaataatttgattcatttataaggagaagttaaagaaaatgcatttgaggtaagctatatttgtaacctggtttcttcctttctcagccactatctaaagactgctaactttcagttcacatcacctcttgaccttgtttcctcattttagttcctagggttgaagtaacaaagtaccactaactgagtggcttaagacaatagaaattcattctctcacagttcagaaagccagaggcccaaaattgaggtatcagcaaggttgattccttcccggggtttcagaggacaaatgtgtccccttctccctcctggcttgctggttgctggcactccttggcattcctcggtgtatagatgtgtcactctagtccctgcctctgtcgccacttggtgtgactgtcctctctttggcttccctctgtgtatgtctctgtgtctgtgtctcatcccttctttaaggacaccattcagattggatttagagcccacccagacaatctaggatgatctcatcctctcaagatttttaacttaatgatatcttcaaagacccttttgccaaatcaggtaacattcacagttccagatgttgggatgtggacatatcttttagggggtcactattcagcctattataccaagcagtcctctagggaagtatgttggtatttcaaattgttgtctgtttttgcaaacttttagaaaaccctaacctccatttctctgattctctgcagttggtcctgagaaaagggtgccagcgatgcctggatcgcctgtggaagtgaagatacagtccagatcctcacctcccaccatgccacccctcccaccaataaatcctggaggaccgaggccagtgtccttcactcctactgcatgtgagacctcttagttacttatgtttgtagttcagagtgacatttggatctaagtgactgacttgtatgaagcgttccacatatattattcagtgttttcaaagtactattgaaaatatagacacagatatatatttctggttgtttcttttataaattacttttaccctctgagaataatacttagcttatttggatatttagttgtttaaatattttgttttcatattctttggctggtaactatttttatttctttgactctaacaataatgaatttaaattattatattgccttatgggattccaagtaagttttctaaaattatagaattctaaaaatgttccagtgctgtcatggtaagactttttacaaaagagaatattgttgtatttgtttactagggctgccataatgaaataccacagactggatggtttaaacaatttatttttattcactttttcacagttctggaggcaagaatgtaaagatcaaggtattggcaggtttggttttacctgggccttgtagatggttgccttcttgccatatcctcacatggtctttcctccattttgcgtccctggtgtctcttcccctgcctttaaggataataatcatattggattagggactactcataatacctcttttaaccttaatgaactcttcaaagtatctccaaatatagtcctattctgaggtacaaggggtaagacttcaatgtatgaatttggccaaggctcgggcagaattcagtccataaccattatgttagctaataatatatgtaacaatatattcaacttcactaaccatcaaggaaatgcaaactaacacccaatacagtaccattatacacccaccaggatgttcaaaatgataccaagttttggtgaggatgtatggagcaacttgaacactcatacaatgctggttggagtgtaatttagtacatcttttggaaattggcagtttgcactaatgctgaatttccacgtgccctgtaactcaacaatttcagtcctatatatctataatcaccaaaagaaccccaaataaactagtatacatacatgcacacaagtgtcttgatcttcatttgagttctacctttccatgcacatgctgccgtccccagttcactttgacactctgcagatcttttgcctgtaaaccaaaatgtactgctatttttggaatgcccaaaaagtgtcagagcactgagctagatgctgtatgtattgtttcatttaaatgccattacacaagcttgcacactgtccttgctcaaaattttttgttttttgtgtttattattttaaaaggcaagagaagagaatgtaagatgtacagctttaattggaagtttattattttccaaaacatttgaaatggagtagctggtaactgtagcattcagtttgagccagagtgaatgaaaagaagtgtgatatcccttttcttaaattctaatttctatctcaaagttgaacagccctagacatatatactatcttgaaaagaaacagatttaaacctcagccatcaatcagatttcaagatacaccaataggtatatgtatatacaaattcagccctttttacttccatatttggctgcttggcggtggttgtgtttcatttcagaaaatgtgatcatacatttttttctaaagagactacgaaaaagcctttctatacatcagagaagctaaaagcatggtaatgtgttatttttattggttccttcaaaatggagcaactttccaatggcaattgacctttctgtgaaaacaaagaaatggcagactattgcaactaattttctggattgctgaggttgagtgttcaactttcctttcattagctttactaattttctttagtggaagacacaagaaaactcaccccttttctcagcccgttagtctgttatgcagtgaatcattcagcagcattttcctaaacaccctttgctgaacaaagcaaaaatatacactgtatacacaacttataaaacttaattaaagtatgcacatatgtattgtgtattgtattattaataagtgaacatctattaaggcaacacaaatatagaaataaacaagcataggccaggcgcagtggctcacacctataatcctaacactttgggaggccgaggaggacagatcacttgaggtcaggagttcgagaccagcctggccaacatggtgaaaccctgtctctactaaaaatacaaaaaattagctggatgtggtggtgcgtgcctgtaatcccagctactcgggaggctgaggaaggagaattccttgaactcaggagacggaggttgcagtaagctgagattaaaccactgcactccagcctgggaaacagagcaagactcggtctctaaaaaaaaaagtgaaatagtggaagcatgcacataggcagcacagagatgtagtgaatccactaaggttaccttcaagcggagcaacagcagtatgtgtcaaagaatgctccttaacagagatgatacctgaaccgtatgggatgaagaagagcttgccaggtcaaatttgagtaaggttcagtgtaagaagagggaacagagatggttaactgactgtgactggcttagaggaagtagaagggaagtggaagattttttatgattaataagttggtttttggcaaaatatgactaaatgtcttttttctaagctaggtaaagattaaatgattggctctttaaacattgcttatgtcttaaattgtttcttatgtttttagataaagtttcacttttttagttttttaaggctggatatgattaagtgaaaacagaatgatacttaggtactagataatttagatttttacttgatgccaacaagaacgtagctcagtgccaggcacggtggctcatgcctgtaatcccagcctttgggaggccaaggcaggaggatcacttgagcccaggagtttgagaccagcctgggcaatatagtgagactccctgatctacaaaaaattttaaaaaaagaaattagctgtgcatggtggcatgtgcctgtagtcccagctactcaggaggctgaggtgggaggacacctgagtccaggaggtcgaggctgcaccaggaggtcaaggctgcaatgggccaagatggtgctgctgcactccagcttggatgacagaatgagaccctgcctcaaaaaaacaaacaagcaaaaccatagctctagggttgttttcgaaattaaaattttcaagaaatgactattaagaactaaataggaaaactgtaattaatcacatgtattataatttgagcaaaaatgtaggatgggagtgtcctgcatggaatcaggaagatgctttattgaatgaccaagggtttggcagtattaatctagcactgttaaggcagagagtaactggctctaatggacatgagtattctggatggccaaagagataggtaccttattgtaggaataagtcattaaatcagtaggcctaaaaaatatccctcatattatcataactcttttttctggtgtcttgctcacatgctaccttctgattgactgcctagtgttttggggaccttgaaattgggaaggagatgcaatgtaaaagatgggcatgagtatcccatcactggaaagatctattggcccagacccatctcaagcactacctgttgcaggaagtctttcttaaaactacccacccctgcccatggcacctgtagagttagatttcccttcttattgctctgggagcactctgctttctttttaacgctccagtgttactctgttaccatttttatctgacagcagtctcactgaggacagaaccagttttgcatacctttataacatgtgctttacaaaattcaaatgaacaaacgaaaatacaaacaagaaaaaatgaacaaaggttcccttgttttacacgtaacctgagtctttcattttggctttcttttagtaagcaatggcatcaaccattctcctcctaccctgaatggtgccccatcaccgccacagagattcagcaatggtcctgcctcctccacatcatctgcactcacaaatcagcaattgccagccacttgtggtgctcgacaactcagcaagttgaaacgctttcttaccactctgcaacagtttggcaatgacatctcccctgagattggggagaaggtgcggactcttgttcttgcactggtggtaagtacagcctcactgttgttctcagctgcctgagtatgtggctcaggtccaaagcgagcaaagttctagatatttctgctcattttcaaacccatggtcatatggcaaatgctacagactagactagttattgaataacttgtgtaaaactgtttaaatgtaggtttcttttcttttcttttcttctttctttttttttgagggtcttactgtgtcacccagcctggagtatgatggtgcgaacacagctcacttcagccttgaccttccaggtttaagcagttctcttgctgcatcctcctgagtagttgggactacatgtgcatgccgccatgcccagctaatttttttattttggtagagatgggatctctctatcttgttcaggctgctttcaaactcctagcctcaagcagtctgcctgtctcggcttcccaaagtgctgggattataagcatgatgtttaattgtagattttatgtcagtgcttatcaaagaaacaatcgataatgtttacttgttatttaaggtggtgatttaattccaataagcaactttggattttttttaaaactgctctcaacaggcccactggtgtccaaccaagttaatgcaaggttttgtaatttaatatattcagtgcttagtgcattgtttccaaaccaaggagagtagagaggtagcaagtttaattttcaaaacaatgatttctaaaattacaagttacgtggcctaaataaatactatcaaaataaacagtatcaaagggattgcattgttcagctcctcgtgcatataaacttgcttaagaatttgcaaggtacacataatttttctttctttctatactgcacgtggtgaacctgtggcataaaggagtgattttctgacttcgacacctgggtggggttttattctcagtgtttataagggaagtactgccagttcccaatgtttctaattgaatttacctccaataaaagcattctgtgctcctttgtgtatgttaacccctttatatgggataaaaagatgaatcacagcactaatccttgaagctgcagctctccgagtgtaaatctagggaccctgaagattctccaggatcctttctggagatccagaaggtgaaaactattttcataatataacagtagactaaatgcaaaagtagagagaatacaactggcttctagtatgctagatattaaagagactttctattatgctagatattaaagagacttgcaaaatgataaaacagtgctgctcttcttactgcatttattttggaaaatacagattttaaaaatcacacctcagtctgaaccaatatagttattttttattttaattaaattctcagctttaatttctgatatagtaatgtcaataaatgtaatccatataaattagaggaattctgagaccaaacagtttaagaattattgccttaaaaaatttctcagtctaaggccagatgtggtggctcacgcctgtaatttgggaagccaaggtgggaggattgcttggatgcaggagttcaagaccagcctgggtacatagtgagactgcctctacaaaatgattttttaaaagttagctgagtgtggtggcatatgcctgtggtcctagatactcagtaggttgaggtgggaggattccttgggcccaggaaagctatgtttgcaccactgcacttccagcctaggtgacagagtgagaccctatctcaaaacataaatttaaaaaatttctcagtctattatgaaaggaacaactttcatacaaggcaaaatgcaatatatgactttttcatcatttgtgaggtttagtccttgttacgtatgactgtaggttattttcattgctatatagtgtcatattgtaggaatataccacaatttatacctttgggttatctgacatttaagtcatttgtaatttggggcagttttggggtctccagcatctcccccatgtttggagatttgccagaaggagtcacaggacttgacatacagttgtgctcacagctaagatctattacagaggcatagtaaggagacatagtgagagagacacagtctggaggaacccatctgcaggtttccttatgctctctgcctctcctgaatggtaacacagagctccctttccttagcaacaaaaataacagcaacatatatgcagtgtttctgtcaagggaagcctattacagactcaatgccaaggtttttgttggggcctggtcacatagtcagtctttgcctagcacctgccaaattttaccctcttagaaggaaaacccgtgtttagcatgaaccatactgttcgcagaaccactctacacacggccacccttatcggttagggagaagtttagttcttttttattttaaacctgtttattcctcaaattttagactactacagaaaaatcttactggatccagagtaaggttattggagttaaatgtcaaaatgagcttgaacataattggaaacaaagcagacatcaaaatgttatgttgattccagcagcaaattaagtattatctattcttaaaaataatttcaagactaaaagtaaaaatgtcaaaaattcatttgcggcgggcggatcatgaggtcaggagatcgagatcatcctggctcacacagtgaaaccccatctctactaaaaatacaaaaaattagccgggcgtggagcttgcagtgagccaagatcgtgccactgcactccagcctgggcaacagagcaagactccgtctcaaaaaaaaaaaaaaaattcatttgtaaaaaatttgaatctttttttagttatgaaaagtatatgtaggtgtgtccaattatttcttttaaatggccacatttgggttaccttttttttccatagtaaaatatacattatagaatataccattttaacctcttttaagtagacagttcagtggtcttaagtacattcatattgtttgtgctgttcaccatgtgtccctgtttgccattgtgtatttagagcctatgagcaccacagggttaaggaatttatacaattgctttttttgaattgtgatgaaatttactatattaactatttttaggtttacagtttagtgacaataagtatattcatattatcatacaaccatcatcaccatccatctccaaaactcttttcatcttgcaaaactgcaccaattaaacaataataccccattcccccctctccctagaccctggcaattaccattctactttctgtccctatggatttaactactctaggtacctcatacaagtagaatcatacagtatttgtctttttgtgactagcctatttcacttagcttaatgtccttagggtttatgcatgttatagcatatgtcagactttcctactttttaaggctaatatttcattttatgtctatatcacattttattgatctgttaattccccaatggacacatgggttgctgccacctcttcagttaagaaaagttttatatcaatgtaggaaactgtttgccatccagggtcctagatgccagccagtggcccaaccttacaagcaggcctttctaaggctagcagttttaggcctactatgttaactcttttttgtacagaaccattacaaataatgttcctatgaacattcttttacacgtgtggaaacactgcacgcaacagtggaattgtggtttcatatgtgtggtgtgtacctgtagtcacagctactcaggagactgaggcaggaggatcactttggtccaggagtttgaggccagcctgggtaacatagacagacccccatctctaaaaataaaggccacataatttagtagctggagttatccatctgcattctgtgtccatggtgtataagaagtaaggtactgagagtccctaactataccagaaagcaagcatgggcattttgcacttcaaggtaatggtaaatgttttgtgcttcacttacttattattatttggagaatgtactttctggaggatagtttggcaatgtttctggtaccattcatcctaagaaaataataaacataaacaatatacaccaagataatcagttcaacattaagtaccccctcccccattgaagctaactgaaaggtctgtaaaaccctgaggaaagtacaatttatctgttgtcgttaaaaatcaagtctcattctggttcagaggcaaggtagaaagacagacttctccctattccccccaataagtagcaaaaagccgtggactttacctataaaacaaaaataattagagtcttcaccaggtgtggtggagtgtgtctgtagtcccacctatgtagtcccagctgaggcaggtggattgtgagcctgggggacagagcaagaccccatcactttaaaaaaaaaagagagagagactcttaaaggtagagagaagacagcagattcactcatgggacccaagggactacataagcagtgagttccctaggttttgtgtttttctgatatatcccacaccaggttatgcagaaaatgttgagtttaagagtaaaaatataggtaagtaaataaactttccttagctggcatagtggagtatgcctatagtcccagatactcaggaagttgaggcaggaggatcacttaagcccaggagttcgaggctgccatgagccatgatcacaccactgcactcctgcctgggtgacaaagcaatactctgtagatagagatagatagatagatagatagatagatagatagatagatagatagatagatagatgacagagcaatactctgtagatagatatagatatagatacatacatacatatacatacatatatatatacataggtaactagctaactaactttccctctcctgagttttctaaattatgtttcttgttggcagcaaaaattactttgcctgatatggttgtcactatatgtagaggaaataattgccaatttttattataaaccaggaggataaagatagacaaggtttctgtatttctgtattttggtcagtggtggttacatgaaaatacacatatggcaaaatggtatagaactataagtatgttgtaccaatgttagtttcctagttttgagattgtaaccctttgggaagccaagttggaaggatcacttgaggtcaagagttggagatcagcctggtcaacatggcaaaatcccatctgtactaaaaatacaaaaattagccaggagtgccagtgcacacctgtaatcccagctacttggaaggctgaggcacaagaatcacttgaacctgggaggctgaggttgcagtgagctgagatcacaccactgcactccagcatgggtgacaaaacaagactgtgtctcaaaaaaaaaaaaaagatgtaagcattggagaaagctgaatagaggatacattggagtataagtgttgcccttgaaatccagagaccagattccctcagcatcttacctctcaacgttcttctctctgctctgacacatctttcccaaagctgcatttcagtttcctcaaggacaacactgatgtacagaaatccttgtccccctaagtttgattcaaatatatcttctctggccaggtaacacccataatcccagaatttggaaggcccaggccgacttgaggccaggagcttaagaccagcctggggaatgtagcatgactccttcctctacaaaaaaaaaaatttaaattagctgggcatggccaggcacggtggctcacgcctgtaatcccaccactttgggaggccaaggtgggcggatcacgaggtcaggagttcaaggttgcagtgagctataatcatgctactgcactccagcctaagtgacagagctagaccctatctctgaaaaaaaaaaatttttaagcaaatacgtcttctctgtgagtcagtagtgtcctgtacatgtgtacctccatcatactgtaatgaatagcttagttgcctcttttcccactagactatgagatctttgaggggaagaaacaaacaattatgctcttaatataaaataaggttttataaactagctgaaggaggaaggtgtttatccctctcatacaggactgccctatatccactatgtatgtaaacctgagtccatttctctggcctaactcactatttccctgtgtcacacaatccatcctttccccttgtctacccacaagtatacttaaaatcattcatgtagcccttccatacatttaatctatttgtgtttgcttttcaagacctgattgcttcccttgcagtagatataaaagagtgtcattctcttacacttagtttttattcctgattaccagaattacaggtttcttttgctgtattgtgcaaatgtcatatacttaaaacagatataacgttaactttaaaagaatttttttggtatgaaatgtgggaaagtgttcaaacattttcctttaatatgtttaaattggacataccccttttccctgaaggaaaatgtcttaatgtttaccgaataataaatatgatatatttggaaaatccaacataattgcacactcagaaataactgttattgtgattattctcccaggcattaaatatatgatataatatgcatgtgtgttatttttgtaagtggattcttagaaaatataatgttctgtttctggtttttcacttaacagtattgtaggtaccttttctgccttaatgcgtacaaatctgctctaccccctccctgcataagcattctgatacatgactcttgtaattttaatgtagctttctgttggtagatctatatattttcctttttttttttttttgttaggaaaatatattgtgatagcgtgggggtaagttgcatgttacatactatgtttttgaacacttacaaagtttctaaaagtaaattcctagaaatgttatagctctttctggggagcaagcagggattcagaataatccccatatttcattttgttcgtttgttttaatttgttatcatacagtgttatcggcaattgaaatacaaatattgtgtgaactttgaagaaaatatttttatttgttcattccccttagcagagttgctgagtctcattcctaatttgaggcctagacttttgggaaaacacagaggacgtccaccttttagagaacagtgataacttaccaatgggggtttgccggttgggagttattctggtatgcataatgcatacaggccacttgaaggtagaaggcaactattcttttttcttttgcttctggtggtttttgtttgtttgtttgtttgtttgtttgtttgaagatttgggggaagttatgccaggaggtagggggcagaacttggaaaaagaaatgaacttttgaaaaaatgtgacactgggttactgagtccaaaatgtcttagagttgacatcctaggccaagtcattatctctgtaacaggaaacattgtaagcttgattgcctgttcctgaagtgacttgcaatgaacccctcaatatcagggatcagagtgcctctcttcatgggtagtgagaaaggcagtgccctattctgcagcctaggctgctgggcaaaggggagaatttggtggtggtgaagggaatcaaggagggtttctgtcataagaaaccagtgtggtttacctttgccaggcgtctgagttcctgatgatgttcctgcagttatccttttccttatgatttaaaagtctttagcagctgagcacggtggctcacccctgtaatcccaacactttggaaggctgagggaggaagatagcttgagctcaggagttcaggaccagcctagacaacatagcgagactgcatctctactaaacatttaaaaaacaaaataaaaagaccgggcgcggtggctctcccttgtaatcccaccactttaggaggccgaggcgggtggatcacaaagtcaggagttcaccgtcaggagatcacaggaggtggaggttacagtgagccgagaccgcgccactgcgctctggcctgggcaacagagcaagactccatctcaaataaataaataaataaataacattaaaaaaaaaaaaaaagaagagtttggcactataagttttggaagtccagttttggaagttgaacaaggttatttatcttttcagaactcaacagtgacaattgaggaattccactgtaagctccaagaagccacaaactttccccttcgtccttttgtgattccatttctcaaggtaatttgataattactgaatataatttatcttgaatatttcctcaaattctgctaatccctgttacgtgatttaaatcagagccgcttgccacgtttttagatctttattttgggctggtagagaggtctgagtgcagttaacagataaacgtcaggtttaatgagatgagaattgcaaaagccttaagttgtggtctgtgtgcagacactgctgctaacacatagaagtagctagcataggagagaataggaggtgcttgggctggaagtgtgaaagtggaagggaggctgaggtcctagcagaagaaataactggtcactaatcctttgggtatagtcagagtgtgaagagtgttgtctgagaggctgtcagacaaaaggcaaggtctttgcagtttagacttactctaaggtcaggagacgatgtaggaagacagtgtttgtgtctccccgaaccccagatagtctagtttctaaagatgtcttctgcaataatgttctctggagcataacttttggagagattgttctgcattatcatgcttacatgataaatgaaatgaggccatgttatatatgttatatttacatggaataaaatcttctaaacagcttttggccagtcacggtggttcacacctataatcccagcactttgggaggccaaggcaggtggattgcatgagctcaggagttcaagaccagactggccaacatggcaaaacccccgtctctgccaaaaaaaaatagaaaaaaaaaatagccaggcgcttgtagtcccagctagttgggaggctgaggcaggagaatcacttgaacctgggaggcagaggaagcaggtgagctgacattgtgccactgcaccccagcctgggtgacagagtgagacattctcaaaaataaaataaaataaagaataaaaaaagaaatatttaagagtaagccgcaaggccgggtgtggtggctcacgcctataatccatgcacgttgggaggccgaggcaggcagattacctgaggtcaggagttagagaccagcctgactaatgtggtgaaaccctgtcttcactaaaaatagaaaaaattagcacatgcctgtagtcccagctactcacgaggctgaggcaggagaattgcttgaacctgggaggtgcaggttgcagtgagccaagattgtgccactgcactccagcctgggtgacagaacaagactctgtctcaaaaaagaaaagtaagctgcagacattatacatctaaatacttaaatacaggtatcaaatcaggaaagtaacattcatacaacactgttacctatagaccttattcatatttcaccacatgtcccactaatgtcttttacaacaaagaaaaacttgggagggagcatagttctggatctgactcaggatcacccattgcattttgttgtcacgtctctttagtccactttaatctggcacagttactcagctctttgtgatcttgacgtttttacagaatacaagatagttattctatctgcgcacctggatttggttttctctggtgttgatttgattagaatcatttaacagaaaaactgtattcaattgttactgtattttgaattttgtcaatatttatggaaatttgttttctctcttttatgagtatctctataatacctttaattttactgccttttttttttttttttttttttttttggggagacaaaatctcgccctgttgcccaggctggagtgcagtggcgcgatctcggctctacaacctctgcctcccgagttcaagcgattcttctgcctcagcctccagtgtagctgggactacaggcacgcgccaccacacccggctaatttttgtatttatagtagagactattaatagtagcgaccatattgtccaggctggtctcaaactcctgaccttgtgatccaccctccttggcctcccaaagtgctgggattacacgtgtgagccaccgtgcccagcgtctaattttgcctcttaacaaagcctaaaatatttactgtctggtcaaataaatatgccccttttactttcttttaccttattttcatttcctaagaaaatgtaacagcatcatacagatgggttatcttactaaagtactaataccagttttttaaaaccttctattggagcacagcagatacacaggaaaatgcatcggtctaaggtgcacagcctgtatcatggctcggttctaatggcattgaagcctcggctgctctgagcagcctgtggtgcctttttgagccctgaaacagctgtgctggttctatcttggtctcctttatgtatgtcagagctggtagacaattatttccccaagactctagaatcaagaaagatttgtgaaatttgtgttaataggaaataattagcatgttttttattcatcatgggacacatgtcagccgtgtaaagatctgacatggtgtttttttcaattaagtttttacagttgcaacaagattgaggttatagaacagactttaaaagagttttatatagtcaaattccttattcttaactctgttattttggaaaacagcatgaggtaggttgttatggcagctttttggctagcatttggggttttgtcaatttatttctgctttaaaacagtcactaattatggtgcctgctaaattaaccctcagtgaagggatggctacttgcatgtattaaaactctcctttcacttgctcatctgtcccttgggattaagcctttgcttatgagcccagcctgcattgcttttaaatttggtgagaaaaatataatttctactttatgttttttttaataaaaatgggaaaagtaaattctgtatatgaaagagatcgagttctgagcttttaaagatgtatagggttttaaaatgtgatttgttcctattgcaggttttctaagtatgagagacagaaaaatacctacttaatgaattatctttttacattttacatcactcccagtgctccttttcaaactcccatgtttcagaataatcacagtttccagaattctgttgcagcttttatacagagctggaaggaaggttgagtagtgctatcagagatgagttggggtccagaagagagaaaccagggcttggaatgactcccacataggcagtagtaattctctcactgactaaagtcttcagaagcgtatgttttaaaattattatgttcaacaaccctttattgagctttgactgtatactaggctgcaaaggtaaataaggtacaatctcttccttaagcatatttacatctggttggggcaagagacaattgaaccagtaattcaagtgcagtataagagatatcattgactcacagaagaagcatttgaaaatcagactgccaaggagagaaaggcttttatcttgtatcatctgctttgtgaaagccctttgaggtgctgagccttcttgtgtagggcctaacactggaaaaactgcctcttcctttcaaggccaacctgcccctgctgcagcgggaactgctgcactgcgctcgggcggccaagcagaccccatcccagtacctggctcagcacgaacaccttctgctcaacacaagcattgcatcgcctgctgactcgtcagagttgctcatggaggtgcacggaaatgggaagaggcccagtccagagaggtgagcagatgagctttgctgtccttgccttcctggaaccgcactggtcctcccctttgcttataaaagagagagaatttgattgctgtggttgtaatgtctcaaactttttttgagacaaggcctggctctgtcgcccagactggagcgcagtggtgcaatctttgctccctgcagcctccatctcctgggctcaagcgatcctctcacctcagcctcctgagtatctgggattacaggcacgtgccaccatgaccagctaatgtttgtttgtttgtttgtttgtttgtttgtttgtttgtttttggagagatgaggttttaccatgttgcccaggctggtctcaaacttgtgagctcaagagatctgcccgcctcaacctcccaaagtgctgggattatatggatgtgagccaccatgcccagcccaatgtctcagactttctgtggttatttttgctttattccaatacctagctgcataatacatctaaaatctatgggagtagcttccagacatgagtatttttcgggaactcttcagatgcctgcacacccggtaagaaactctactctagagaatttatgggtcgactgttccagaagcctcaggagtacagttctgccttttccttgatgctgtttgtagaaagaattggaaaaaaaaaaaaaagaaaagaaaagaaaaaacaaaaaaaaagaaatacaatctgccaaatgccttttatgtcaaacgcatttttttctgatctgagaagttttgaaaaagtatagcaattaattattaatatttgccaatgactcacctttactgagattaaaattaatatgaatttattttagaaaactccctatgagtggctatcaaaatattctatgggttatcaaagaaggcaatatcaacaatagtggataggctttaatgacatttttttaaaagtaaaaaaaaaaaaaaaaaaagaaaatttattacagttgaatctgagtgactgaaaaccctgctactacacaattggacccactgttaatttgactggctttaaaaaaaaaaaaaagacacaattggatttgttatatgagcctttttcctcccatgtagtttctttccagtaactcatctccacagtaacaaatttgaccttaatactttcctaagtatggttgaacccgtaactcagaaaaacggtgtcatctccttagtctctcctttgctttataagggttaatgtttctgtctggttatggatggatttgacctcttttttcatgctggtataagtcagcaatttacatgaggtgcctggcccttgaagacaattcagctcatgcctcatgtcacacctttccttagaggcttcctgtttatgccagcatgtagcaaaatacctaatacatagtaggttctcaggaaatgtctgcatgaacacttgttgacaggatcagatacgcacttctgcttcttctacaggagagaagagaatagttttgatagagacacaattgctcctgagcctcctgccaagagagtatgtaccatcagccctgctcctcggcacagtcctgctctcactgtgcccctcatgaatcccgggggccaattccatcctacccctccacctcttcagcattacaccttagaggatattgcaacttctcacctgtatcgggaacccaacaagatgctagagcatcgagaagttcgtgatagacaccacagtcttggtaagcaaccgaagcagcatggtaaattcagactggattcttggatttctttccaactcaatgataaagtcaaataatatgattgctttttcccactgattggataaaacaatattatacatagactattagaatcatagttgatcttatttgatatcaatctcatttgataccttgttgctatgatatgatagaagtacagctaggtgtggtgactggtgtctgtaatcccagctcttagagaggctgaggtggaaggatcacttgaagccagtctgggcaacatagtgagatcccatctctacaaaaaattttaaaaactagccaggcttggtggcatgcgcctgtggtcccagctactagggaggctgaggagggaggatcagttgagtccaggaagtcaaaactacattgagccatgatcttgccactgcattcagcctgggtgacagagtgagacctgtctaaaaaagaataaaggggtatcgcctattctcagatggttcagaagaagagaatgaaaaagcaaaggaggtaaaatgttaacatttgagaactctgtttgaagatatgtgagaattctttgtgctccttttgcagctcttctataaatctgagtttattgcagaataaaagtttttaaaattaggccaagctcagtggctcatgcctataatcccagcactttggaaggccaaggcaggaggatcacttgaggccagaagtttgataccagcatgggcaacatagagagacctcatctctacaacaacaacaacaaaaattaaaaatgaggcaggaggggctgggcgtggtggctcacgcctgtaatcccagcactttgggaggctgaggtgggtggatcatgaggtcaggagatggagaccaatctggctaatacagtgaaaccctgtctctactaaaaatacaaaaacttagctgggcgtggtggtgggcacctgtagtcccagctactcaggaggctgaggcaggagaatggcgtgaacccagaaggcggagcttgcagtgagccgagatcacgccccagcactccagcctgggcaacagagcaagactccgtctccaaaaaaacaaaaccaaacaaaaaacaaacaaaaaaaatgaggcaggaggactgcttgagcccaagaggtcaagactgcaatgagccatgatggtgccactgcactcccctcctgggcaacatggtgagaccctgcctcaacacaataaaaaatgtttttaaaattaagcaggaaagatgcaagatttcaccttggaggagaaagtgcatggacatttaggtcaggaggtgaggcatatcgaaatcttggctctgcatcctaactagctgtgtgatctcaggcaagttgcttgggctctctgagcctcagaagagtaatttctaaatgattgtaacgccaccccctgtgctaggttgttgttccatttggaatgcctggtatataggtgctcagaaacctttaaatttaggaagaaacagaaaagaaaccttaacaaacctcttctagttttggacagagcggtttgtcatgtactcttacacgttttcagcataaggttttttggagtaaaactgctgagcagagaaccaaagggctatcagcttccagggtttccctaaatttccatgtataccttgttgagtaaaaaactgcaatacatttgccctcacttcctcttacttaggctcactagcatctttcagacgcttggccacagtggggcccctggcatcatgtagtgggatagtagctgaatagggaaggctgtagcagccatggtgttctcagagccaacatttactgagtcgtagctaccacttagattgtgttgtaagtacattgtcttattttatcctcacaggagtcccagacaattgttatcccctttttacagatgaaggagctatggccaaaaatcacttagctaataattggcagagacaaaattcagaccccaattgtcttatgcccaaggtttagatgtactggcagtatgttatgatacttatcctagtgttcaacccctgttactcctatgcctctcttttatctattaaaaactgcttgcgggcggtctggcgtggtggttcatgcctgtaatcccagcactttgggaggcctaggtgggcgaatcgtgaggtcaggagatcgagaccatcctggctaacatggtaaaaccccgtctctactaaaaatacaaaaaattagctgggcgtggttacaggcacctgtagtcccagctacttgggaggctgaggcaggagtagggcgtgaacctgggaggtgggggttgcagtgagccaagatcacaccgctgcactccatcctggcaacagagtgagactccgtcaaggggggggaaaaaaactggcttgctttgattggaaatagcacagtgggggaaaaaactggcttgctaattaatggtttcttctggaccttttttgccagtttgacttgagaaagaagtatgctaaaaactaggtatggggtctcactatattgcccaagctggacccctgggctcaagtgatctacctgtgtcagcctcctgagtggctgggactataggcccaccccaccacacctggcttttattactacattttttgacagattttacaaatcatgaggaactcaatatatactgaaataaacagattatcacactaatacatagtcactatgaatattatgactataaattcagactggtaacaggggtgttgtgttaatgactcaaagactaagcactgttactgtatgtgacttaggtttaaaatagtagacaattcttactggtatacccttaattcacacagttgttccattcctggaagtttcagtatatatcaaaactatccccccaccaaaaaaatttttttaagttactgataatattaagctgtttccaagtggttataccagtacacacgctagttttggtggttaattattcgcattgcaccacatccttgtcaacacttagtattatctgacattttaattttttccagtatgttagatgtgaaatgctatgtatgacatacctgtttatttcttttacctctttttctttagggctatttcgtgttttacaattgatttgttggagttttttatataatgtgaatcgtgatcctttgttggttatattgtcattttgtgggtcccccaccccattgtgaatcattgccttagtagtgtgatcaaagttattatgaatatgtgtgtatttacttggtagaatttgcttctattgtgtttttcctgctatctttgaatttaatctgtaatttctaataggtctaaatggaggctatcaagatgagttggtagatcatcgtttgacagaaagggaatgggctgatgaatggaaacatcttgaccatgtaagaatcttgtagtgtgtaatgtccctaactctttattacttttttttgaaacaggagtctcgctctgtcacccaggatggagtgcagtggtatgatctcagttcactgcaacttctgcttcccaggttcaagcaattctcctgcctctgtcttcggagtagctgggattacaggtgtacgccaccgtgcctggctaatttttgtatttttagtagagacagggttttgccatgttggccaggctggtctcaaacccctgacctcaagtgatctccccacctcagcctctcagagtgctgtgattacaggtgtgagccaccgcactcagcctacttaatgctaccaataattaatggaacatgtatgcttgaagtgaacataaccacagccatgacatcctttgcttttaataaaagctggtttagctactactccctcagctgaggaattacagagtcactccctaatctttgtgatgggatgatcacttcaggtcagaaaccaaataaagtcatgtagtataatggttaacaacaaaggtttgtagccaggtgcagtggcacatgcctgtagtcccagctactcgggaagctaaggcaggaggatctcttaagcccaggagccaagacttcaagtctagtctgggcaacatagcaagatggaattcatttgtatttgttaaatttttatcaaaagaaactttctttttatttttttcaattctgctccttctgtagtaaagagattgctttttagcccacatactcatgtttcgtagttttagaacacaggtcagtaacaaacttctaggtaattcaaccccccaaaattgtttatattccaaaattattttgcactctgaaagatagcagccttcctcatctcatcaaaattcataatttctgttagaaatgtgtgtgtgccttattttatggttcagccacagcaaatttacagtgctgcagaccctagggatacaacaaatgctgctgcaacatgaaatagtagactgttggccagaaggccatgcatctgaggttttgtccaaacactggaagccctggtagttattgtcctctttaggtatgtcagcctcaacaccaatgtccttcctagctgatggagaaacagacagcaataaaggttttaaatgtaaacttgatattcctaaatctgtactttaaggaacctgaattcctcatattgcgttggcctgatttacagtgttggttgtttgaatgttcttatctcatctctgcctggccccctctgtgactcaggcgctgaattgcattatggaaatggtagagaaaacaaggcgctctatggcagttctgcggcgctgtcaggaatcagatcgtgaagaactcaactactggaaaagacggtacaatgaaaacacagagctgaggaaaacggggaccgagttggtctccaggcagcacagccctgggagtgcagattctctcagcaatggtaaggggagagtctacgggaaacccaaaataaatgtcagcctttagagcccaccaatctgtcacagaaggcgttttctacttgactttaaagaaaggtggtactcaattgtggatttagggaaactcaggtgattatgaaaagtaaatgagaaaatatatgaagcccctggcatgttttggtgggtggcgcaggaagggggtttttttgttttggatagacaggatctcactgtgttgcccaggctggccttggactcctggcctcaagcaatcctcctgcctcaccctcccaaagcaccaggattacaggcctgagccactgtgcccagcctcgtacttggcgtgttcaaaaaatgttaattcttcgtggagaatgagaatatttgtgattttgttctgtctttaactctttacatatatgtgtgctaggtgttggtcagagtgtttggttgtcaaattcagcctggctggatgtatgtactaggcactcttgtgtcatcactttcatttctcacagtagccctgaaagtgtttaccttaccttccctcctcctgtccccagcccaccattcaggaaaataccactcaatccaccatggcctggtggcctcctacaaaaggttttaccataccacgctgggttgtttccccttgcctttcagagtctgaagcagcagcaatccagagtacatccagcaaacctcagttattcccctcaaaatgttccagcacattcacccagtaactgagaaagtgccctatccaaaggcatagctgagtgacaggccatctgtgataagactcttcccacgcactctgagttcccaaatgttcaccacgaagaacaagtctcttacgacagacctagtatgttccattgaaggcagctattagtctctaaaagactgtaaggaaaacttgaggcaaagccagaattaatacagtatgtacagacagtgggagttaaaggctcacctttccccaccccacccacagcagcagctctggagccaaccatggaattacaaccattaggtggaatatctagcacaacaaggcgtcaacacatatgtagagttatatagtatgattcctttcgtaaaaactcgaaaaacaggccgggcgtggtggctcatgcctgtgatcccagcactttcggaggctgaggtgggcagatcacagggtcaggagatcgagaccatcctggctaacacggtgaaaccccgtctctactaaaaatacaaaaaattagccaggcgtggtggcggacgcctgtactcccagctactggggaggttgaggcaggagaatggcgtgaaccccggaggcggagcttgcagtgagccgagatcgcgccattgcactctagcctgggtgacagagcaagactccatctcaaaaaaacaaacaaaaaactccaaaaacagacaaagctaatcttctggtctccctcactttctgaacatttgcagatccctgtgcgactttcggacagggagaaaggcttttggagacgtagctaaagtttacacccaagccatacctcattcatcagtgagtccacatgtgtgcaggtgagaagcatagagtacagagggagctgcagtcgtgagccagtggttgctgagccaagatacagctcttgctggagtcattcaggtcttgctggagtcatttaaacatggctatgcatgaccactactcacctttctcaccttttgcatcaaggattagctctggggagcatgttttctgatttgcctgagacagtccagtttatacctgtgtcctgttaatagttattactagcatttccctcattctcaacaatgaaggcaatctggatgataagttatattgtcattctaggtttggtttctgacagcactatcaacctgatttagatagtatattttagtgtcatttatatgtttatctcatgtttattacttgtccattttagtatagtatgacagtataattcatatcctaaataaatgtactatgcaaaatgtgaaccaaaatgactccaaaaagtgccactggtctgattacatgaggagcttgggcacggttggcttcatcaagaaagtcttactgtgaaattagttctttttgtttgtttgtttgttcgtttttgtttgtttgttttgaaatggagtcttgctctgttgtccaggctggaatgcagtgcacattcttggctcattgcaacctcctgggttcaagccattctcttgcctcatcctcctgagtagctgggattacaggcacctgccaccatgcctggctacgttttgtatttttagtagagatggggtttcaccatgttggccaggctgggctcgaactcctgaccttgtatgatccacccaccttggcctcccaaagtgctgggattacagacataagccaccatgcccagcctgaaatgagttcttagacacatagttgttttacattctggcatatgttataccaataatcatagtttgagtagcattgtcctatattgggcagtattcttagacatttcaaagaatttcaccaatgactttttttttttttttttaacagagtctagctctgttgcccaggctggagtgcagtggcatgatctcggctcactgcaacctctgcgtcctggattcaagggattctcctgcctcagcttcctgagtagctgggattacaagcgcctgccaccacacccggctgagttttttttttttcagtagagacggctggtcttcaattcctaaccttgtgatccacccgcctcgtcctcccgaagtgctgggattacaagcatgagccaccgtgcccggcctcaccagtgacttttaaataagtaattagtgtttttgtttgagacggagtcttgtctgtcacccaggctggaatgcagtggcacgatcttgcctcactgctccccaggttcgagcagttctcctgccttagcctcccaagtagctgagattacaggtgtgccctaccacagccagctaatttttgtatttttagtagagatgaggtttcaccatgtttgccaggctggtctcgaactcccagcctcaagtaatctgcccgccttggcctcccaaagtgctgggattacagacataagctaccatgcctggccaagtaattagtgtttttaaagtcttgggttagctgggtgcagtgtctcacgcctgtaatccccgcactttgggaggctgaacgaggtggatcacgtgaagccaggagttcgagaccagcctggccaacatgtcaaaacactgtctctactaaaaacaaaaaaagttagccaggcatggtagcacatgcctgtactcccacctacttgggaggctgaggcacgagaatcactcaaacctgggaggcggaggttgtggtaagccgagatcacacactgcactccagcctgagcaacacagtgagactctgtcgcaaaaaaaaaataaataaataaataaataaataaaagtcttgggttatgcagaaatccatggtgtggatagttattgaagtaaagtggtttggtgatttggagagaaattgactagaggctttagatggcattattacttttcccatttaaattaatgcaatgtaggtttccttacctgaaaatttatgattcacaatgttttcacaaatagattttgttcagacagcaagcagtgtatttaggtgtcattaaaggatgcataaataagtgcaaaaaccataaggaaaagaagaaaatgcttatcacagagatcaggagactggtttcctctggctgtgtgggtggagggtgcagagttagtgagttctaactacgtctattcttgggacaggattgtcagtctggctagcattatttaaatactactatggcttgccatgacttacctcttagggatttggggttgctggtactgttctgtttcctgaactcaggcttatgatgttaaattgtatattaatatttttattatattgtatgttaatattttatgaactggtcagccatctaactttgcaagtaaaatttttttttgtttgtttgtttgtttttgtttgaaacggagtctcgctctgtcacctaggctggagtacagtggtgcagtctcggctcactgcaacctccgccttttggcttcaagtgattctcctgcctcagcctcccaagtagctggaattacaggtgcttgccaccatgcacagctaatttttgtatttttagtaaagacggggtttcaccatgttagtcaggtcggtctcgaactcctgacctcgtgatccacccgccttggcctcccaaagtgctgagattacacacatgagccactgcatctggccaaatttttaaacaaagaaaaagaatacttaatcagctatcagtttttcctcagaatgacagtcaagctcacattccgggcccttctggatgttatgattctgagacccaaaaatctgaatatagtccacctgtggtggctgacgccagtaatcccagcactttgagaggcagaggctggcaaatcgcttaaactcaggagttcaagaccagcctgggcaacatggtgaaaccctgtctctacaaaaaatatgaaaattagctgattgtggtggtatgtgcctatagtccggctacttgggaagctgaggtaggaggatggcttgagcccaggaggcagaacttgcagtgagctgagttcgtgccaatgcactccacctgggcaacagagcaagaccctatgtccaaaaaaaaaaaaaaaaaaaaaaaaaagaatctgaatatatgtgtttaatgagttcaataagcaggcaagtttgggaaaactgcctctagttaagtccatagcagatggacctcattcagtgtcacagggcttccaggcaactttttagtgacatgtgtgcacaattaagggtgaccactctctagaggtaagcctctaatattggagactgaaataaacagaaatgggaattaatagtagctcttcagggaaaagaaaactaccaataatgtagcattgttaatatctctggtgagaaaaagagaacaacattagaaatctacccaacttatatatccaaatcatgaatttcaaaaagaatgagcagaacaagtagagaggatagaatagttattgaaataattccaaaaaattaccaagacctgcaagacagttccaggttgaatcagtctaccaagtagacaacacaggaaaataaatagacttagtcgtttagcatcattgaaagttagaagacaattctgaaggaaaattattttaatttagaattctatacttaaccaaaacaattaagtgttagattagtaacctacaatttttcaaaaaatgcacctcctgcctaccctttctccacagtatctactgtaggatatgcctcaatatgtgaaagtaaaccagaaaatgggagacactgaattcctgaaagaggatccaacacaagaaaggaaggaaaggaatccctaggctggtgaaggagagccccaagcattagtggcaaagcaggcctagaaagcgcccagtccacgctggaacagcccagaaccttgctagagatttccttaagtaaatgaaatttataaaagatttacacaacaggaggataatttgagattgaattggaagtaattacatagcagcctggcacaatggcttacaactgtaatcctagctctttgggagactgagacaggaaaattgcttgaggccaggaatccaagacctgtctggaaaccctgagatagtgaaaccctgtctgtgcaaaaaatttagaagggaaattaggcggtcatggtggtacatgcctaaagtcctagctactcaagaggctgaggcaggatgacctgagcccaggagttcaagggtgcagtgagccagtgatcagctgtgtatcactgcactctagcctgggtgacagaacaagaccctgtcacacacaaaaaagtaatttgtaaaaatgctgcctttcctccccctacatttttccataggctcaatggttaacaattaatgtattcttgtagaattttctatgtacatatttaaagataatgtttcctaatgttttattttgaaatttccgaaacacgtagaaattttgaaagagaccaccctggccaacatggtgaaaccccatctctactaaaaatacaaaaagaatagccaggcagggtggcgcacacctgtactcccagctacctctcgggaggctgaggtaggagaatcacttgaacccgggaggcagaggttgcagtgagccaagatcgcaccactgcactccagcctgggtgacagagtgagactccgtctcaaaaaaaaaaaaaaaaaaaaatctgtgtgcatttatgttttatacatttatattttagggggtactgtaccttaaaaaccgatgtttataggggaaaaaattaggacataataggtaagtaaaaagaagaaagtgaagatcacttttaatctcactactttgaaatactgttaatttgttcatttgatgggggtgtgtgttttaaaactaaatatttactgtactattttataatctggtttttagcccttatatgagaatttttttatactaaatgaaatatatgtttgagtctaagtggtgaatgagaaatctgatcaaaaataaaactgctgatcatagacagcttctgaccctatgctttttatgtctcttctgcagattctcagagagagttcaacagcaggccaggtacaggatacgtacctgtggagttttggaaaaaaacaggtatgtgtctgactgcttgtaggtcatacatactcactaatttgtgggagcagagaacagataactgggtgaatggttggtaactgggtcctttggttgtataataacttgctcctcatagagctctaggctcctgcctctcctgctctggcttgtcctgcatgtctcctgatacctgtcttgttaatttgcaggtcaggagtttggaatagctccctccagtccctttcacactcttccactgggtcacgctgaggcaataagtacctgttgacatgtcctgtttctgggcttgcaacagagttcattttgcctgatctcttcactggtggctacagtatactgtgttcacactactgccacatttgtgcccaaattctgctctgggcacagctctgtaatccccctgtgctttctttcaccttctctgtgcctaccatagtgaagactgttcttggtaggcctcctcttttacaagaataaaggagggtggggactgcctattttgtaagttcaaggatgaacctcacatcactaatgtcagccttatccaaatattggcattctttcacttcttgcctccccatcccagtttcattttttaagtccaatacaacttttggttttcttactaagataaaatttatttctacaaaaatgtaatacctacattcataaagactcttttaagagcatctagacagtagtaaacaaataaaagatatgaacagacacattatgctatgagaaatacaaataaacatattgcaaaatatttttccttactagtagtcaggataatgtaagataaagcatatctgataaattaaccccttgtctttaaccgtccgttattgacaattttaaaagaccttgttgatgacactcaataattgatcagaggcttatataagaaattaagtgagtacctgcagattcttggaatcattcctcacttttccttttttttttttttgagatggagtttcgcgcttgttgcccaggctggagtgcaacggtgtgatctcggctcactgcaacttccgcctccccggttcaagctattctcctgcctcagcctcccaagtagctgggattacaggcatgcaccaccacgcctggctaattttgtatttgtagtagagatgaggtttctccatgttggtcaggctggtctcgaactcctgatctcaggtgatctgcctgccttggcctcccaaagtgctgggattacagacgtgagccactgcacccggccttttttttttttttttttttttttttgagatggattcttgctctgttgctcaggctggagtgcagtggcacaatctcagctcactgcaacctccacctcccaggttcaagcaactcttctgccttagccttccaagtacctgggattacaggcacccccgaccatgcccggctaatttttgtatttttagtagagatggggtttcaccatattggccaggctggtttcgaactcttgacttcaggtgatccacccgccttggcctcccaaagtgctaggattaggattacaggcatgagcctgtaatgtgcccagccacaagatctcttttaaactagtgagtttgattatttgggagatacctttggttaactatggttaagagcccaactttggtgttgggccagctaggtttgagtccttgctctgctacagtgccatctgtgaccttagacgacctccagtaagatagctagccaaaccgagatgattattaattcatgcttaagctgaggggataaaatgtacctaagagcattgttacactggctcaataagaggcatctgataagagacttatgaaaagttcttggcctctggggtgaagattttcttaaggccagagccataagatggaaagttgtttcatggtagcctagaactctgtgtttgaacctcccttgagcctgtgccatgtgcaagaggtaaaccgtgagggagtgtccttaggcttctggattgtctagtcctgtggacttacgtagggagctacgtattttgggacttcacattcacattctcattgggctgaggctcaaacatatggaatgtgttattttgcagcgtctacattagggaaatcaagcagggcattggtgatgggaggaagtgaacaggaaccaggtaggatgatggtaagtggacagggtttaaaaacccagggcttttggcagtctgcccaaatctatgtctttagcccttgtttgtgcacctagtcttatttatttaattgcctcctggccatttacacctggatgccccagaggcacctccaccttctcacttgcctccacactagctttgtgtggactgtccatttcattgcctagctttagcattcttctctttcacctccacttccaggcccttcggtgctcccaacctttttctgcctcatcccttcctcagtgccacttattcctgcctaaattcagcctcttctatcagttcaatcattgcaccagcctcccggttgctatctctgtctttaatcttccccttgcatagaatcctttatggagtttcctttgaaaataaagtcaagccgactgggcacggtggctcatgcctgtaatcccagcactttgggaggccaaggtgggcggatcacgaggtcaagagatcgagaccatcctggctaacatggtgaaaccctgtctctattaaaaatacaaaaaattagccaggtgtggtggcgggcacctgtagtcccagctactcaggaggctgaggcaggagaatggcgtgaacccgggaggcggagcttgcagtgagcagagattacgccactgcactccagcctgggcaacagagcgggactccgtcgcaaaaaaaaaaaaagaaaataagttcaagccgggggtggtgcctcacccctataacactttaacaccaacgctttgggaggctgaggtaggaggatcacttgagcgcaggagttcgagacaagccttagcaacatagtgagacatcgtctctacaaaaaaatttaaaaattagccgagtatggtgggacacgcctgtagtcctagctactcagaaggctgaggtgggaggatcatgattcagagaggtcaagtccgcagtgtgctgtgatcgcaacagtgcactccagcctgggcaacagagcaaggccctgtctcaaaaaaaaagaaaaagaaggtcaaatttcttagtctggcatgcaagactttttgcaaaatctcatttccatctaccatctcaagcaaaacacatgtcttgattctcccctgcccactgaagagctgatcacttttctccttggaactctagtctcttacgatgacatacacgatggcacctgaaacactttcatacttggtcacaagcagtcaggagagtgtggcctgtgtctagtcacttgcgtccacagccctagctcggtgcccacctccatctccgtacccagccagcacctgcatggatggacacatgagtgtgaagatcatgtgttcctccctgtggagttttagaaaagatcactttgtgtcagctctctccttacttagaattgccgtgggatgggagggaaaagatttctcggccagttgattttactgtcactttcttctagaagaagctgtgaataaggtgaaaattcaggccatgtcagaagtacagaaggccgtcgctgaggcagagcagaaagcctttgaagtgattgcaacagagagagcacgaatggagcaaaccatagcggatgtcaagcggcaggccgcagaggatgctttcctcgtcatcaatgagcaagaggagtccacggaggtcagagctctgcgccctgggggctggggtgagcagctggagtgaccacgcccgctgccttcctctcatacgctgggcaggaagacacaggcagtccactcttgagctcaatgaggataatttttatccagtgccaggagagttttggttctcatgctaagactcttttacatgccaagatagtgaattattacattgtatttttacatacatacatatatatatagagagagagagagaggctcagtgtattggtgtaaattttgagaattcaccctaaagacagagtttgtgtgattgcacgatgatgatgatgaccagcattgacggagtgggcttactgtgtgccagacacccagcaaagttgtatattttctttttgagtctcacaatggccctaatttgcagatgaggagactgtggctcagggaatgcaactaatatacccctttggtgctgaagtcaggatacaggagtaagaaagtgcagggtcctatagcacctaggctttttttttttgagacggagtctctctctgtcccccaggctggagtgcagtggtgcaatcttggctcactgcaagctccacctcctgggttcacgccattctcctgcctcagcctcccgagcagctgggactacaggtgcctgccaccacacccggctaattttttgtatttttagtagagacggggtttcaccgtgttagccaggatggtctcgatctcctgaccagcacctaggctttttacaaataggatagctggtttgtggactgaagtaacaggttgggtgtatctgcctgattgtccaggacccaggatccagggcccaggacttggtgatggttctatacaggacgcttgagtactacagtgaggagaaaaatcaacaaactgaaaaagaatctgtgacaacatgagaacagcccttttgaatttaatgcagtttttctgtaaatttcattttagtcatttttcagctttaaaacaagaaaccagtttctttctgtaagtaggtagatctcatctactggatgggagaccggctgtctttgggacattctcttgaagttcagcactcactctgtcaccgaggctggagtgcaatggtgcggtctcggctcaccgcaacctctacctccgggttcaagcgattctcccacctcagcctcccaagtagcttggagtacaggtgcacaccaccgtgcctggctaattttcatatttttaatagagatgggctttcgccatgttggccaggctaatcttgaactcctagcctcaagtgatccacccaaccttggcctcccaaagtgctgggattacagatgggctttttttttttttttaacaaacaatagaaatgttattttcttgtaatttaaatggtccatttcagtattgtactgtcacacatggcaatgtgcagatgaaaatgcctaaataccacgtggctatcacagaggatgtggtgaaattccttattacagctcttcaatacagatactatggattgtgagaaaatagtttctttaatccccctcccttttcgttctctcctcctcctttgtcttttttttttttgtgtgtgtgtgtgtgtgtgtgtgtgtgtgtgtgtgtgtgtgtgtgtggataacagggtctcactatattgcccaggcaggtcttgaactcctgggctcaagctatatatactcttgcttctgcctccctaagagctgggattacaggcatgagccaccacgcccagcttctcctcctcctttttctttagaattgtttttgaggctgggcacagtggccaatgcttgtaatctcagcactttgggaggccaaggtagtgtgaacacttgagctcaggagttcaagaccagccttggctagatggtgagaccccatttctgccaaaaaaaaaatttaaaaattagccaggcatggtgtcatgcacctgtagtccaggtactttggaggctggggcaggaggatcgcttgagcccaggaggtgcaagcctgaccatgatcgtaacactgcattccagcctgggtgggagagcaagaccccatctctttaaaaaaaaaaagaaaaaagaaaaaaggtgatgacgatggcaagatgagggggaaagaaaagagaattgtttttgagagtgagatatctgtttctcttctctatgtttaactgtgtatgtatagccatccatatcagtatctgtatttgtccttatttatctacttttatctctgtttatctttaactatgtctatctccaaagaaagagtatagcttttggcttagagcatagatcctggatctggactgcgtaggtttaaatcccagctctccattttgagcattgtgcttttaaggaattgtaattttaaataagccacaaagtagcctccaggtgaggtgcacacctggacctatccctgcaaaatcactttcaaaagcagggaagggatagagggcctgtcctttggatgagtttgcattggaccaaaacggctgattctcgtccatcaagaatgttcagctagaatatccttgttgaaatttggcaggtattcctggagtttcttgttcatcttgtgaaaggtggtctggtgtgggggaggaaggaggccaggactggaggttaggagccctgacttctagccgagttccctctcatactggcagtatacccttaaaggagtcagtctccatctctgttcaatgagtatagcagctcctatcctattggtctgatagttattagggaacaggcacagtggcccatgcctgtaattccagctctttaggaggtcaaggtgggagggtcctttgaggccaggaggtcaagaccagcctgggcaatataaggagactctgtctctacaagaaattaaagaatcagccaggcatggtggcacatgcctgtagtcccagctactcaggaggctaaggtgggagtgtgggaggatccctggagcctaggaggtcaagtccagcttgggcaacatagcaagaccctgtctccaaaagaaaaaacaaaacagcagcagcagccttcgttgagtcagattatcagtaaaaacaatgaagattattctctaatgagggaagcaatatcagctgggcgcttataatcctgacactttgggaggctgagacaggcagatcacttgagcccaggagttcaagcgtagcctggccaacatggcaaaacctcatctctactatatatatatatatatatatatatatatatatatatatatatatatatatatatatatatatagtatataatgtgtgtgtgtgtgtgtgtgtgtgtgtgtgtgtgtatataatgtataattacaaaaattagccaggcatggtggcacatgcagaaaggagtaggataaatgttcgtcttaacacatgtggtcttaggatagatggctcttgggggagaccctggcacagagtttggtttggtttctgactattaaaatgagccaaaagatgagtccatgccttaggcaggagagatggccacctgccctaggctggtgctgtgtaaggtattttcacacacacatctcatttcactgttcctgtcatcttgcagggaagtagttttcttgttttacagatgaaggaaactcagaaaggcagtgtgtatttctcatagttaaacagcagtagagggcggagttgaccacaggtgtatgtagttccaaagctggggttctctacatacagccccttgctttactgtgcagggaatgaatggcaagcctgcccctcaatcccagcaaccactaactgatgcctgtgtcttgcagaactgctggaactgtggccgcaaagccagcgagacatgcagtggctgcaatatcgcgcgatactgtggctctttctgccagcacaaggactgggagcggcaccaccgcctctgtggtcagaacctgcatggccagagcccccacggccagggccggccgctgcttcctgtaggcaggggctcctctgccaggtccgccgactgcagcgtgcccagcccagccctcgacaagacctcggcaaccacatcgcgttcctcaacacctgcttctgtgacagctatcgacaccaacggactctgagccccggactctgcttaccctgatggctgctcagcaccacagagtgcttgggctgagggactgactgttggaacccgtgcatgtagctgccgggtcatcagcaagaaatgaattggaggcaggaagagtccaagcctgaataataacaccccacagcctctctgtgcacttgctgtctgcggagccagtgtgccattctctgcacatgggcagccagcctgagctgcctcctccatggctttcctggtttgttcctctctccactgaagctgacttagccggccccttttcagtgtagaccaccagctcccctccccatctccttgagtcagcagactgtccaatgtgctcagccaggctggaggcggcaggcggcaggcagcaggctgtggaggaggcccctcggtcagggagcggcctgcctcacccctgaatagctccttcggccccatctccatcctcagcagatgacactgattggcctcacggggacttgggtaagcaacaggcggcattcaggactcttctcaaccctgctgttcagacttgataagatctcagagtccacaggaaagaagtcactgttgcaataaaagcacccgtagtagcaaaaacataaaacaaataaaacttcccccacatcacagatgattttggacaagattttccaaccttgctggctactttagtttgggacctgttttttttctcatttgattttgcttgtgcagaaaatagtttccagcacatggattgatctgagagagaatgaggctcagttgtggatagtctgttttctctgagcatgttggccaactagtatcgtcaaattattgagtggatcatctcttggaaatgcagaacttctgccaccacttggctatttgcacagtcatcttgttctgtgtccttttatctctcagaccacacacatctggaacgctgtgggcatcttctgcccatgggctccatttggcacctgctgagccacagttgtcctgctggatgtgctgtgcaggttggtaggacttgcccccactgtcaaggcctggtctcatctgaaaagccctcctggacctcaaagaattcttcagacctcatagttacaggtcattatatctactatgttgatttatcatcaggcacacaacttctgtttccttctcttgtgttatctgatagcgtccctccttgagctcatcagaaaggttttatgaaatgtgaaccattttgggaaaagctgatcaatttttcttcctagcttcccattttcaaatgggacatcactcatatccctttcagaatgttaggaactgcctcccacattcttccctgtctttttgggttttgttttttgttgttgtggtggttttttaacacaaagtctcactctgttgcccaggctggagtgcagtggcatgatcttggctcactgcaacctctgccttccaggttcaagcaattctcctgcctcagcctcccgagtagctgagattacaggcgcccaccaccacgcccagctaatttttgtatttttagtagagacagggtttcaccatgttggccaggctgatctcgaactcctgacctcaggtgacctgccttggcctcccaaagtgcagggattacaagcgtgagccaccatgcccggcctgtctttttggttttgatgggagtctgaggaccccgacccctcctgctctccatctttgagcctctggcatcctctcacacccagaaatcagttggagtaagtttaattggccctgctccagctggcctttgaagcacaagtttaaatctccaccttctgtgcactgaccagagtctaaaataaaagttgtcagtaccataaaggaaaagggatccacacaggtagccttctccttggatacaggtacatcttactgtaagaatttcaagtcctggctgggcgcagtggctcactcctgtaatcccagcactttgagagaccgaggcaggcagatcacttgaggtcaggaattcaagaccaacctggccaacatggtgaaaccctgtctctaataaaaaaaaaatagaaaaatcagccgggtgtggtggcacacacctgtaatcctagctactcaggaggctgaggcaagagaatctcttgaacctgtgagccagaggttgcagtgagccgagattccaccactgcactccagcctgggcaacagagcaaaactctgtctcaaaaaaaaaaaaaaaaaggcaaaattaaagaatttcaagtccctaatttactctaaccaagcattttcagtcttacaaagaaatctagtgcacgacacctttaaaatgcctagatttccattgcctaaagtaaggtgtgaccagtgaaacaacagcagagaatcatgttcctttgctgtggaacacataagccccacagttttccagtcagcctaatacatgggtatcccccgaccccatctgcctccttaagccacagtccttggtggggaactctaagggggacggagtcagtaccccggacagggccacatttgcatgagacatggctgtctcacaggtcacagagccattacaacagcttactagtttttcatggatttgttggattaacaccttaagcaggttttttattgttattttgtttgtttgtttgttttgagacgggagtttctctcttgtctcccaggctggagtgcaatcgcgcaatctcggctcacggtaacctctgcctcccaggttcaagcgagtctcctgcctcagccttctgagtagctgggattacaggcatgcgccaccacgcccaactaattttgtatttttagtagagacggggtttctccttgttggtcaggctggtctcaaaccccggacctcaggtgatccccccaccttggcctcccaaagtgccaggattacaggcatgagccactgtgtccggtcttgagcaggtttttaaaatctccagtggccataaaactagccagggtagctcatgcttttactggttggaataaggagccaaaaccaacaaaataatatttattagggctcgatgcccatttctgtggctaaggcttaggtttggtgtgcagagcctggcctgctcttgtgggctgtggttgctgtgacagtttcgttttctgaatctttgtaatgctcttccaccctgctcgtgctgcccagaggctgatctgcaaacctgggcagtattccacactgaagctcagtttgcaaaccttctgctgtgttaattctggtcagtttcacacagaagtcacgagggcctctgcccaggaccttctattcacatttcaagaatccctttctgaaattctccaactctctggtcaggaggaggagcaccattggggcggggtaggcagctagaggcgcaggagcgaatccaggttccttgcgtggttcccagcctctgctgacagcacctcagctaccaggtggggagtggaaattcagcctgcttagaggactgacctctacagttcatatttgcagtgacataaaaggcaaagaggagctggcatggtggtacagaaggtatcagtcaagcgcaggctcttcagaaacctagaaactaaaaagagatgcaacatgtgactggccatcagccagacatgtctagggtgagaccagtgctcagcaccacccgccaaggaacactgatgagttgtgggacattatggtcggccaagtgaggaatgattgcagggaccagagaagaccaaagatgccagatgtccccagagtttcttgagggctgggtttcacgtctttgcttgtcctttttgtccccacttgcctgcaccgtgcctgactcatccagtggggaaggtgactcaagaagttgtttaagcctaggcctaggcagtccacttcgggaggtgggggcactccacactggggggccctgcagctccagggctggtgctctagcagatccgctcaggcacggttgggtgaccgtggggtcaccgattgcgtagattatttctagggcagtgctgggttagaaatgtctgtctggaaacaggacacatcttgccaccacaagtccacacctggccttggctgctgcccgctctctgcagcgtggatttcctttgcccatttgggccagaaggtcaccaggagttcatcactgcttagtgtcaacttgacatcttcagcttccagacagaaaacccatgctttactttgtacagccctgtcccagagttagtaagcctcggcttgtcacctgcttgcaaagggtatagacatcattctgggtagttctagaggatatcgcaacaagtgcgtttgaaggttcagcacagctggaattgtacggtagtgagctcttcaaaatgaaaacagaatgaccggatggccatctgtcctggaaactgtagaattgaataaatcactgaaaatagaacacttcttggaggctttcttcagaactgaactagaaacaaggtttccaggctcccaggtcagtagaccaaaccaacttccttagatttttttttttaagctgtttgcagaaaactgggtggtagcgtgtctgaaccaaacggaagaatagccagcggagcatggactgttccagcacgggccagatggccagctgtcgagagcagccctgcccagattgcggtgggggctgtgccagcggctccgcagggcccttccaactctggagtgtctgtagttcttgtgaaaccaaaacgttgactacctgcctctttcctcgggcatcgacgtgctcatttccaaagatgatggtgcaggtgaccttttccatcgtgagctaagagaaggttaggaggcctgaggggcgggccttgtgtcccctcctccccctccacagcccctgaggtggagcttccctcacagaccccatctggtcgagcctacggctgcccagtgtacactcagtgatgcttataccaaatagggcatgtgcgctggtgtctgttggggacagccccatccctaccttggagtcggcagagaagcagcaataagcattaggcgaatgattgaaagggctgctgcgccaagaggccttcagtccccttaacgtggctttccaacttcctgacgaggctacaaaggctccgctcacaaaagaaagccaataatgtaaataaatagaaaacgaagcctccacgcgtggtttttaaagggggatgatgaatgtgacaccacccacagaatgcattagaatctggtttttctgtgctttgtcattttactctgataggaatttttgttacctaactctgtgcataacttatttaatgtactgtataaatgaaccaaaactgttaaatatgtatttagtttgttctacttaaagtagtcaataaaaaggctatattccttttctgcctcaagctggaatgggaccgggaggaaaggtggtccctacactaggaggtgtcccctcaccctaattcccaaatccttgaggaagagggagagaggggcctcaactggttctagtcgtggcctgaagagcatccaagggcatgaagcagggggtgtctgcaccccatgtgcctggaactggcctctctggaaagccagctgcaccaactggtcagtgccctgtggggaccaggcccaaccaggctggctgctggagcccaccagtgggcctgcggtcaagggccaacaacagcttccagacactccccgttatttcttttaagtggtgtttcgttttgttttgtggggagggggcagggtctctgttgcccaggctggaatgcagtggcacgatcacagctcagtgcagcctccacctcccagactcaggcaatcctcccacctcagcctcctaagtaactggaactacaggcatgggctaccacgcctggctgattttttgtattttctatagagacagggtttcaccatgttgcccaggctggcctcaaactcccgggctcaagcgatctgcctgcctcgcccccgccaaagtcctgggactacaagcatgagccactgcacccggccaaattatcttgtaataaggaaaaatgaaccacagagaatctgaccatctgtcctgcctgaacagggtggtggacttgtggatatattttctagtaacatgtattttcttgtaaaattttaacacaaatgttaacaaacatacctggacttgtcaaatattcacttatgtccttatgacactgatgttaaatcacaggtaattttactgttgccttccaatttaatttatttgctaaatggttgcatcatttaattgaggccataattttttttaacccttcaccttctgttgggcaattggatcgctttcgcgttttccagtgtggcatacatcttctatgcatactctttcttcgcattatttatttccctaggataattttccaaagtgggggtttttgatactgaacatttcttggatccttgaaatctgtacaaactactctccctaaaagcccaacagcttgtgttgcctccagcagcccctgggtggtactttccgtggccctaaggctggtgcaggcacacctgtgtgtggaatttcaggctgccagtccggtttaccagctggtgagctgaggcctcacttctgtcactcagatacccatctgtgctctctccctgagacccgcctctcctgaacagccttgcccaagaggctcgttgggaccactagcttcacaatcccctagaatgcaaggggagagggactggttactagatctggagacgaggagaagggctagcctatggcgtaggggttggctgtatgatctttggtgcaggtggtgccaactgcaaacctttctgggctgcactgcaatctgcccacctagaacaatgacaagatctcagtcatgggactgtcagccctccacaagagcactatgttggtggaaacggaatgtgccatagaaatggcaggctgaaaatcttttcgtgaccacaaaacacccagatgccagataaattataatgaatgtacttttaactgtattgctgaggtcacagataggacatttccaagaactcaagagttggagggagattgcctctaggcgcaatgtgaggcttggttttgagcatatacaaagtacggaaacaaaaccggggcctttccacaatggcaggtagctcagcacctttggcaccgtgaaaaggcggcagggaaaatctgcccatctgcaatggaaactgaattggaaacagctctgtccctgcttgagaaaaagaaagaaaaactgggccgggcgtggcggctcacacctgtaatcccagcactttcggaggctgagatcacttgattccaggagtttgagaccaacctgggcaacatagtgagacgcccgtctcaaaaattaaaaacttagctgtacatgtcaggtatatactgaaggaaggtcagggaatcctggtgctgagaaattaagataattaaggaccttcagggtcaatattgtgtgtcaaccaattataagctgtccggaaacactactgaaccttcaagaaaatgagccattgttagcaaagtcaacaggaacaataattgatttaacccctgggacttcagatattacaatcaccagatacaggcagggcacagcagttcgcgcctgtaatcccagcactttgggaggccgaggagggcagatcatgaagtccggagtttgagaccagcctgagcaacatggtgaaaccgtctccactaaaaatacaaaaattagccgaatgtggtggcaggcgcctgtaatcccagctactcaggaggctgaggcaggagaatcgcttgaatctgggaagcagaggttgcagtgagccgagatcacgccactgcactccagcctgggcgacagagagactccatctcaaaaaaaaaaaaaaaaaaaaaaaaaaaaaagcacaccagatacagaatacaaaatatgaaacctctgaagatggcactgaaaaacaatgagcaaaaagagtctgaaaatgactaggcagatttgaaaatagaattctggaaatgacaatcattgaaataatgtgttattcaccaatagattacatcaacctgaaaaagaaaaaattagtggtgcgttacctttgtcagaaagagagcaaagaggccgggcgcagtggctcatgcctgtaatcccagcactttgggaggctgaggcaggtggatcacgaggtcaggagatcgagaccatcctggctaacatggtgaaaccccacctctactaaaaatacaaataattagcccggtgtggtggcaggagcctgtagtcccagctactcaggaaagtgaggcaggagaatcgcttgaacccaggaggcagaagttgcagtgggccgagatcatgccactgcactccagcactccagcctgggtaacagagcaagacctcatctcaaaaaaaaaaagaaaaaaaagagacaaataattgggaactgtgaaagatctgttcctctggaaggttaggaagggaaagccttttcatgtgttaccaagagcagcatccaagagcctgctaatgtgtttctcagcagaaagggcactgtcctgaggtggggataggatcttgggaagcaaacatgtctcttgcccgtctctgcttgtttctgactgctggtatttcagggtcagggtcacgattaggcatgtctccttcttagccttccttccaagaggcttgggggaaccagcgacagtccccactccactcctcaggtgggcttcattgcctgctgccaggagccctcttgtggacagagctggactttccccctgggttgccaccatccctaagccagattcctttccagagtacacaccagcagcttttccttccccttcgcatcagcattttctcaggctgcctttccaccccatgagttaatatttgctaggttcctcctagagttccagaagtgatcggggatcagtctccccaccttctgagggctggctcacccaggccctcgcactgggctcgtccttgctgccccgtctgccattttgcaggccccgaggcctggcattgttccttcttttggtgtagctgcctctacctcctccagctggggcgggtttctgctaccggagggtgtcctctcccagcgctgtttactcctgatggctagcagctgttggtgccagggagtggatccctcctgcgtgactcggagcaaggcacttattcactgagctttttcctccgtaagctggggatgctaacgatgcctatacctctggggtgttgcgagggtaaaatgcaatcaacaacatgggtatagcccctagcacagggcctggcacccaaggcacccctgtaaactggttgctgctataacctgtttctctccccaccaatctgtggtttctttgaggattgatctttgtgtccagcactctatgtggagcctggtgtcctgctgaagtagtatgtttcgagaataattttttgaagaccacctaattctcagtccctttcggctcataagagactgtgttaaggggacttgttaggagagctgtagggcattggccaccatctagactgttgctatctccagcctggcctggcactgagccaatccctgggacaggtttgaatatttacaggtgagtcacaggtgcaggtgtgaggaaggggagaggacaggtgcagggagtgggtggaagggtgggggcggcagctggccaatgagcccggagctctcctgacttcagggctctgcctgcccttgaccgagtgctgtcaccagcccagaacatttgatcatccccagcacctgccacaaagcaggtgcccagcgcaggattgggaaaggcgccccagcacaatggcactcacctgctccttacagtggaagcgtttctgtggcggacgggtggcttgggacaaaagccacagacagggtgactggggttgtaaatggcccagccttggctgccaggacatgaaattatgaccttgatgctgaaggcagtgggtgccattgaagggtcttggccagaggtgcgtttttcaaaatggcaacatttcgaaagccgcctctggctgtgtctttacagggaatggacggggtgggagccaggtaaagaagttgctgcagtcttccacgccagagaggacggtggccctgacttgggggctggggcgaggcacaatggtggggatggcaggctacagatgaggtgggctcgtgagatcgacagacaaggcagaggcttgagggcttcctccaggtccccacagccccagcccagctcagacgtctgttctgtggctgcagctccagccatgtctgcgctcagctccacccccacccactccctgtctgggaccctcctgtctccctgtcacctgcaagacaacattccactcccatgcacccggcctcctcagctcgccccagccctcacactccaaggatcccttctgccctcgcacctgcccggagacctctgctctacttccacagctcaaaccaaacactgtcctaagaggccccctgaccctgctggacatccctgcctgcgtgccctcctctgcagctccagctttcaggagggaggacacagcctttcttattaaaaattgtaataaagaggtgtccaccttcagaactgcactgcagggcgaggcaggcagggtgcccagggcacaaaaactaaggagacgcccaccacagataagtcagcctgagggcttgggcatgtctaaagatggcagtgggctgggcacagtggctcatgcctgtaatcccggcactttgggaggccaaggtgtgcagatcacttggggacagcagttcaagaccagcctggccaacatggtgaaaccccatctctactaaaaatacaaaaaaaattagccaggtgtagttgtgtgtgcctgtaattccagctactggggaggctgaggcaggagaatcgcttgaattcaggaggcagagggtcagtgagccaagatcgcaccactgcactccaggctgggcgacagagcaactccgtctcaaaaaataacaataataaataaagatggcagagggaagtttttttagttttgaggatttgttgctacagtttttgtggaggacaaaagaagcctttacaacacaggacgtaaagcagggcgatgtcctcctcagctgtcttctctaacaagacacactgcccagcctgggcaacatggcgaaacccccatctctacaaaaattagctgggcgtggtagtgtgcgcctgtagtccttggctcactgcaacctccgcctcctgggctcaagcgattctcctgcctcagcctcccaagtagctggaattacaggcacacacaactacacccgaacaagcctcaagcctgctcagagccccatgtggttcagatggtggcagcactttctaggagctcccagagatctgggaagcggggtggcgggaggacggcctggcactggactggccagggtgccagcagggacctctgtgcaggtggcccagggagccaggctggtggaagaaactgtctcccacaggggctgccagggagaaaccgcagggaagaccctgcctggagtcccagatgggaatgcccaccctgaactggtgccatctgagttgccttgtagccaggcctcagcccagtaaggacctggcaacaccagggcgttcaggaacatggaaagggcactcaacccaccggccaccccctcaccccgaattaaagcctcccatggcctccttgggatgtagcacctcagaggcccagcctcacccagccctctccccctggcacccccagctcagccccgctactgggtcacccttggttcaaccaggcaagccctccttctcctcagagcccatgtgccgtctcctctgtctggaaaactgacgccaacactcccaggccaggtcaaatgccatcctgtgcttctgtggtgccaggggcctcctcttcagagcagctgcttagatgtccctcttggtcacctcccctccatgcccccagtaatggaggggggcaggaggacacccccaggggctagtaggactgactcagccattgtccaactggaaccactctatgtggggtggcagtgacaagtccagcttggtgaggacaggtcttcccacaggagcgatctgggcccagaggaggctctgtgtgggtgaagccagaacccctataaaacctgcagagacacgtcaccccctccctcaggcaggacccagcaccagggtgtgtcagggccagggaccctgaagtgggaaaacttgcgtcagctcttgtgagcatccactctgcgagcgtgagggcacaaggtgggaacccgggggcttcccaagagaggtgccctgcctggagcttctggcctgggaggcgcacaggccccacagcccagacctgcgagacaggaggcaacactggaagggaccactgcctttattgcctctgtgctggggtcccagcctggggttcagaggcctctgggggcaataggtgaccctggacccaaattattgctacttggccaggtcaccttggggcttcccatactgccctgagaatgggtgggatgagggcatgcaaacgatatgcaaatgacatgcaaaccaacccagaggcctctggcacatccatgggtgctggaagagtcagagcctagtggcctgggagggcgacggggcacccagctcaggcccagcctcggaggcaaggtttgagggttggggggtccctgagcatcagccctgcttctgccgctggctgaggaggagcagaagcctggtcccaagacagcaggaagaaagcaggaccctcgctaggcggccagatggcctgaggcccacccagacagggacgggacctgccctgggtcgctcagccaggcagggacagcagggaccagaatccaggtctcctgagccaggcagaagccaaagtagcttggaggctgaagtgacaaacaataaaatacagggataaataaatcaataataaatagaaagcaagcagcccagtccctgatccctgggctgagagcccttccaccaggcccaagtccaggaggagacaagtcctggtctttgcgctgggctggccagtccagaaggctccagagggaggcaggcagggtcccggggccctcggcgtgtgcaggtctggctcagttgttattcattatccaccaggaggctgggggtcagaggcagggggtcaggagccctcaggagcccactgcccctccagggccacagtgagtgggggtccaccgcatacctgggaagaacacagtggtgagggtgtccggggcccgcaggtggtcgatgaggatgcgctggaaggccttgctgccaggcgactgctggtgcctgcagagacccaggctacagtgacctcgctctccccactcccgccccatcctgctgccaggatcagaccccggcccttctcacactgcctctggagcctcagtcctctcccctgtgacacggggaagctgtgtgggtggaatgaagggcactgcacacggtgcttggcataggcattgtcacatacatggtgacaagtgtgtattcactgagtgcctcctgtgtccctgtgctgtattcagctcttcccagtcacctcctttagcccataggagttggaactgttatcacttccattttggaaaggactcgggggctcgggcaggtggggtcactcatctgaggtcacagagccagtgagcgggagagcagaattagaaccctggcctgactcactccagggccacattccatggtgttagcggccagactggcactcataccttctccaggaggcctcatcctgccagaactcatacagggtgaaggaggcaccgtccagcatcttctgggcggacacactgtagggccaaagagatgggcaggccaggccagggctgccaccacctctgcctccccggcctggggcctcatgggaaccctgacccacccaggatggccagccccagcacccctctctgctcaccccctccccactggccatcccacctgccagctggggactcactgcagacaatggctctgggcccctgtgaagtccacatagcagcgcagggctcggtggaagtcctgcaggccttcctctgccacctggacctgcctctgggccatgaggatgtgctggtgggagaggcagccggtcagctggtgcggggccgggcacaggggagggactggctgtggcctccaggaggttctcagctgtttttctgtttgtttgttttttaagacagggtcttgctctcacccaggctggagtgcagtggtgtgtgggatcacggcttactgcagcttctatctcccaggctcaagtaatcctcccaccttggcctcccaaggtgctggaattacaggcatgagccatcacacctggcccctagccttcttgactgatgccagatccaacctaccctttagctgggttcctgccgccaacctgccccccagcctccctgtctccatcctcttctccctgtctccaagggtgctgcttgatccagccactgttcctcctcctgcagtatgccaccacttccttccaccctccagcttccgtccacactgccccagacctggctttcggaaatgctgatggggaaccaaagcccagagaaaggtggtggttcctgcaggttctcagaacccggcacctgcttgccaggcctgggggcggggcacatgcgcactgcagagggttggtgggcaaccggccccatgaatccccaattcatgagcacccccagacacggccatccagccgcttgcccctctcctgggctcaccaagtcaggccccttggccaggtcctcttcacgcaggggttccagccggggggcctgtgagggcacagagtgtgggccgggcctccagcatgggcctggctctggtggataccaggagggtcctcccttgtggggccctggccccacggccctcaccttgcactcgagctggtcgatgagctcctggaggcggttcacctggagccgccactgcatctcggcctctgagctgcgccctgtgtgtggggcccgtgcagggtcaggcaggggcctctcaggtcccgcaggtgctcagaatgaagtgaggggcagtgaaggagcgggccctgggggaaggggggatgcggtgcctgcctcggccaggcctcccaccccaccccaggcgcacctgtgtcagaagagccgggggaccaggtggatgaccggctgacactcctcagggctcggcgtcctgcccgccggctgccgcagagcctgctctgcgcctccacgctctctgcatctgacctagaggaagtgaggctcacagggccgaggactggggccccaggacgggataagcctgggtggggaagacaagcctcctgggactccgaggcctagccccaaagccagtctcatttcaccccgccatggctaccctgccatggcttccccgcccgaaaatgcaggctccaggatgctgggactgtggggatttggaatgggggtacaatgggcgcttgtgcactagccccacaggttgacagcacccttacataccgccagccatgggcctgggcctccagggtatctgacgccccctccagcgagctctgaagggcttgcagctggctcaccgtctcccgcagcaggaagcgcgtcacaaactggtccactttggaggccctctcgtactcctgtgggccaaggagggacggtcagcatctcccagcccgggcactgatctcttgagtgggtcccctgcctcttgcccatcagagcagcggtggcagtgccaagagcaggggcacgcaaacctggcacaggcaggagggtactgagacctgatgggcagggagggtctggatccctccttgtccgggactggcctccctccccggaggtgtgaggccaactcacagggggcatctgcccagcgaagtgcctggcctctctggacctcatggccccttccctgatggggctaccaccttcagcactgtcatagccagtgagtcccagccacagctaggctgggtgggggctatcacgaggtatccaagggccaatgttgacacaaggcaaaataatggcgtggtgtggccccagactcacaatctacgtattcactcattcattcattcactcatacacacaacactgggtgctttttactaggagctgctgataaaagacaatcaggttgccattctcactcagacacacacgccggcactgaccccaaccgacactgccagcctcctcccagcccctctcagggtggcagagaggcagggaggctgcccaaatgctaggccctgcatggcccagcatgggattctgaggctcctcaacaaccgtcagttcctggagcttccatttcctcatctatcaaacaggaaagatgaaactcagcacatggagctgcaagaacgtcccaggagttaattcctgcataggactcagcccagggtctggcacgtaagctctcgatgccagacctaccagccatctatcgtcaagtgtaatacaataaagggcctgcccacttgtacacccaggagtcacagatgtcctgagaattgcctaacccctaccacacacacacacacgcatcagggtgggagtcctggggagctgcagtccaggtgcctgccctctccgaggagactccagaagccccatccatcagagacttcatctcctgccatgacctgcctcagctcagccatcggatgggacctcctgggccaggcttatgagctaggagacagggacagagaagaggctgggtcttttcattctcagacaggccagggtttctatctccatgaaatcttcccaaaaaattcctttttgggtatttgagatgattagtttctgttgctttcaaccagagaacagacagaagcacccactcagagccaagcactactgcaagaagaatttcatttagtcttttgtttttctgagacagagtctcactgtatcacccaggctggagtgaagcggcatgatcttggctcaccgcaacctctgcctcccagcttcaagcaattctcctgcctcagcctcttgaatagctaggtttacaggcctgtgccaccacacctggctaatgtttgtatttttagtagagacggggtttcactatgttgcccaggctggactcgaactcctgacctcaggtgatccacccgcctcggcctcccaaagtactgagactacaggcattagccaccatgccaggcctcatttaacctttgtaacaatttacaggaaccataattgaccccattttgcagatgagaaaacaggtccagagaggttgattacctgggctaaggtcacatagcaagttagtagcagggccaaaattcatacccaaaccacagaaatccccctctattcaccactaagcaccttacatgcattgcctcatttatgatcattagcccagttttacagctgagaaaccaaggctagaagtgactgagtggagcccagattcacctgtgggccctggaaggcggtgctcagagcctgcaattggtgaggtcagcccgtgaggtcacaatgttgccagggcccagggggcagagcagacggagtgtgggccatcgtccccagtggtgaccagccctgccatgggaaactatagttcccacaaaaggaccaaagcacccaagcaggcccgcaaggagaggccggctgacatggacaaggcctggtggaaatcgttcctcaaccacctcactcggaagaagccggctgtgagggcgggggatggggagcagggctggggaggcagctggggggcagagaaagctggacaagtgggtgggaagggatgctgggagtctaggccttgtatgcagaagtcctagggggtgagggaggaattcgaaaatctctcccaaggatgaggatcccaggagcccatatgggtgtggatgggggtcctttcaaggtggctcacgcctgtaatcccaacacgttggtaggccaaggtgggtggataacttcagcccaggagtttgagattggcctgggcaacatagggaggccccatctctacaaaaattaaaacttagctggttgtggtggtgaatgcccgcagtcccagctactcagaagactgaggtggactacgtgagcccaggaggtcagggatgcagtgagccgttgacagcaccactgctccagcctgtaggacacagcaagaccctgtttgactcagtcttaaacaaaaaaagcccagaagggagggcagagattccagaaccagaaagtggatgagacttgagagccccggggggtgagcatgagtgggattctctcccaaccctggacgaacgggtggagatcccaacacggagaatcagttctagttggtactactggagctagaggcagggggaattccctagtgtcctctcttcagctcctaggctcagaacttccctgtctccctctcaaatgagcagaagccctggaccaggcgggggtgggaggtgctgaaagcccctgacatagggcctggaagggatctcataaacttagacggagctggtctcaggaagtcagcctgggatggatgagggtttccagaaaggaggcggagtccggggcgccacgcagggaagggcgggcttccccgcggcctgaattggacaggggtcccctccagccctgtgcacgagaggatgacaggacccgggtggacgacaggacccgggtggacgagggtcccaggagaagcgcggagcggccccgggtcgtgggctcggccctagcgcgctctcccgcctcacgcccctgttccacccccagaccaggatcgtgctgattctccccctggacaagcggcagccgctggccaacgctgggcaacggattgactacgcgtccggcgctgggctgggctccccggcggcacccagattgcgcggagcgggcgaaggtagcgagcgcgagccgaggatgccggtactgctgctgctgcggcggcaagaggcgcggcggccggaagagggcggggccagggcagctctgagctggccgcggctgctctcgcgcttccggtccccggggaaggctccccgcgaagccggccccgccgaggagcagccgcgcaaacggtgccgctgccctcgcccgcagctttaaacgcttggcccggaccccgcccaataaagagtgcgtggcaaccctggcgcctgcgaaccctgtcggaggcgtctgggcgcggagtcggggtgggcaaagctcagcctaggagccgcagaggggtgaacggggcgtgatgaaggcagagccatcgccacggtctggagccagggctgtcttttgctttctccttccttgtgccaagggtcagaacagaaccccaaaccttgctacagtggcgggaggcagtttccttcccccaacactccaaatccaggtcacatcctgcccagtctgcaggctcaagggaggtgggcttgggcaaacccaggcttggccacgctagtgagagggacctgcttccggtaaagcctgacatccccccagcatccagaaatccctcttaggcatgagggagggttcccggccaacaggcaccatcctgggtaagaacagccaggatggcagtcagctggggcaaggcctgagacgtggattctgcctggggacgcacccaggagaagctggaagccctgggcctctctctggcccctcactcctacacattgtgcttggtaaccccaaagcattcaggccccccagtcttccccaaggcacctgtctcccaacctaccctgtcccatctccttccccacgtgacaaagactaattccaaaccacttacctgtctagggcagctcactcccctgctcataagctttcaacaggtctccattaccaacagggaaaaagcccacagcttcagtctcactccccaaatcacttagaagaagccctgccacactttctgtgggcgggatcctgctgctgcttctcctcactctcccgggtcccaaatccagctccacacccaatgccacccctggcctgccaaacctgcagcccgccttcctgccacactctggtgaccaacctcaggatgccctcttttgggggcagatgcagcaggactgaagtcccagctcactacagccatcagcccagcttctgctgaagatgcacttttgtcaccgccaccaggatgaacatctcctccaccttgcctgcaccaggctggaggctgcaagagctataacatcactcctgctaattgtgagaactgactcttccctaccatccacatggttacaatcagggtaaccatgttcttccatggggctgcacctcctgcccatacagtgattggcccaagctggtcctgtcagcccctccccctaggactgtgattcaggagctgtaagagaccatgttctctacttgaacatgcacaggctaagccagccttcagaataaaaacacaatgcaggccaagcgcagtggatcacgcctgtaaacccagcactttgggaggctgaggcaggcagatcacgaggtcaggagatcgagaccatcctggctaacacggtgaaaccccgtctctactaaaaatacaaaaaactagccaggcatcatggcgggcgcctgtagtcccagctactcgggagactaaggcaggggaattgaacccaggaggcagaggttgcagtgagctgagatcacaccactgcactccagcctgggcaagagagcgagactccatctcaaaaaacaaacaacacaatgcagtgcacatcctgggttccccacagccccgcagtcagattctgttcctgaaacctgatttcacccttgctcttgatatccataacatgtaagatcctttcaataaagtccttattttgggttacattcacctgagtcttctacctgcaaccaaactggtcctcaggaggatgaggctttgcagagacaagaagtgacctctttcctgtgtggggggattattactaccttttggaggagaaaaccgaacccagagaaagatcaagacttgcttaggactgcacagtgagtcagcttcagaactgagtcttgctgggtgcggtggctcacacctgtaatcctagcactttgggagtccaaggcaggtggatcacctgaggtcaggagttcgagaccagcctggccaacgtggcgaaaccctgtctccactaaaaatacaaaaattagccgcgtatggtggtgcatgcctgtagtcccagctactcaggaggctgaggcaggagaatcacttgaactcggaaggcagaggttgcactgagctgagattgcaacgctgcacgcccagcctgggtgaccgagactccgtctcaaaaataataataataaaaaaaagaactgagtctcaaactgaggcccacgtgaatccatccgtggaagcccataaaggtagggccagagcctctcgggggctcttcagggaagctgcagatctgtgatgaaaaagctttttcttcagcactgggaggggtagggggccacacatctggacagagtacatcagataattctaagtggtttgggaaaggaatcagactgtgctgggctgctgaagccagacccctggatgccaaaatcactgcccttggctctgtccagaagagaggatgggtccagggagttgtcataaggtagggagctgcgaagtgcagctgctggggagtgaggtcacaatgagcccaatccaagttcttttctgccttctgaccagcccctcccctctccacaaccaggaacttccgtcaagcccaggtgagaggtgccaggaggctgcctgggtcctcaagggggatatatgtccaaatggccttaccacaaggccccttcgccctcaaagttctgctcctcccgggggcttcttaggatctaaaaggatcagtcctagccatctcgtcagccatctcagcaagggctgacggggcggaacagcaaagcagaggcgggtcctgagagcgtggagcctgaagcccggcgccagagggagaccaagagggtgagatgcggctggaacccagccagagcggagactgaagcctgaactaggggccgggcctcaggcctaggaactagccacgagctgaaaaggaggcggatggcccggacagaagaggcggggctttcagaccagagggcggagccaagagctgaaaagggtggtgatttggtccagaagaggaagaacttaggctccggaggcagagccaaaggctgaaggggactactccctaggacagaggccgggaggtatcgggccgacgaagccgagtggcgcggaggagcggagccttcagccccgcggctgggccgagcccgaaggtggcgtcggtgtcggggagccgccgcgtgcaccggccgtcctccctgggccgcatcgcggtggtggtggaccagggctcgggcttcaccaaggcgggcttcgcgggcgagaaccagccgcgcatagtgctgaagagctctagcttggtgcccagctgggaccggccggtgctgcccggagcgccgggctgcgagctggcgggcggcgtggcgcgggcgcaccccatcaagcacggcgtggtggcggactgggaggcgctggaagggctgtgggagcgcctgctggtgggcggcctgcgggtgtgcccagagcagtggcccgtgctggtgagcgactcgccgttggcgccgcccgcgggccgcgaaagggtggcggagctgctgttcgagaccctggcagtgcccgcgtgccacatggctagcaccgcgttgctggcgctctgctccaccggcgcgttcagcgggctggccgtggaggcgggcgcgggcgtgtgccacgccacgcccatctacgcgggtcactcgtggcaccaggccaccttccgactgaacgtggcaggcagcaccctgtcgcgctacctgcgggatctgctggtggcggcgaaccctgacctcttgcagcaggccctgccccgcaaggccatcacacatctcaagaagcgcagctgctacgtgtccctggacttcgagggcgacctccgcgaccccgcccgccaccatccggccagtttcagcgtgggtaacgggtgctgcgtctgcctcagcagtgagcgcttccgctgccccgaacccatcttccagccgggcctgctgggccaggctgagcaggggctgcccgcgctggccttccgggcgctgcagaagatgcccaaaacgctgcggacacgcctggcagacaccgtggtgctagccggcggctccacactgtttcctggcttcgccgagcgcctggacaaggagctggaggcgcagtgccggcggcacggctacgcggccctgcggccccacctggtggccaagcatgggcgtggcatggctgtgtggaccggcggctccatggtggcctccctgcactccttccagcgccgctggataactcgggccatgtaccaggagtgtggctccaggctgctgtacgatgtgttcaactgagtcaggctggactggggggggtggcactgcgttgggggacagctctctatctaaagagtcaagtgtttggagctggcagggtcctcctggaggttggagctgactggatgggtcacccccataccctttctgggccaggagaaggtatttgggacccatgggaccctcattttgaactgcagtttgaatctccccaaccactgccagttcagagaatgccagtccagctgcctacccacagggccctactttatggcaataaaggtgatgccccacttgtgtccatgccacagatatgggagttcctccaaaccctcgtcatgtaccatttggacatacatccgatgccaggccccaaggggcgatcccttgaaaagctactaaatctcatgtgaaagtcaccaggaggaggagccctgtgcctagccatgtgctcaggtcattgttgactatgagtgcctcagtttccccttctgtaaaaagtggggtcaggcacaatcccgggcctgctcactgctccctcccccttacaagagctatggagcaaagggaggtggagatatttcttgaacacacaaagggaagggcagcttattttttggaagtcaccactcaagggcctcaagccctggctatcagcactgttcgagcttgtgtatacacgtgtccacacaaacgcgtgggtgttcacgtacctgcctactcacgtatgtcctcgggccaggccctgccctgtgaacctgtgagcacagccttccacgcctagcccagccctgaatgatatcccaccacagttgtgatgggccagcaactaaagcaacagcagcccctagtatgaagcacccagtgtatgccagacattattctgggtgctggaaacagaataaaacagacaaaaatccctgccttcgttctcactggtcacagtgatgtatgaagggcagctctattgttatgatggtttacagatgaggaaacaggcccagagaggtcaaggggcacagctacaaagtgggagccaggatttgaacccaagcccctagctctataaccctgagtcaagactgtggaggatcccacagcacagcagatgcccactgcctcacagtggatcccccaccatcagccactccactcaccagcttggtggcatccatggcagcgagcactgcacggttcagcgattccaatgcagccagcaccggccggtagacacccaggtgctctgagaagtagtctgcaggcagaagaggtgctcaagggttcctggacccccacccatctacccaccctgggattctggccccctggaattcctcagcagccaagcaggccttatatcctgagcccagcccaacctgtcccatcaggagaccagcaacagtcccttgccacacgtaccctggggcccaggggccacaggagaaaagagctcccatgggcctactcaccacacagtttttctgtttctaaattgctgcagggaaaagagaaggcgcccttcagacctgggcctggtaaactgggactaatggggccaatgccccacatcccaccccaccaactcccagcttagcctaacaaggccacttctgctccaccccagattaagttgctcctgtggacagagtccttgcagggttggagaatgggttctactgcccccaccaatcactctaagggcaaagattcagacccattcttggctaccaagaggatctcaggccaggggaagatggatgtggacacaggccagtgagaagtggtcagagctgcgaaggggaagccaggtgcaaggcaatgaagtccagggacggcatggggtatttagttgtaggttagggagggtttcctagaggaagagctgcctaagtgaggccctgaaggacaaggaactgggtggggagtctggccaggaggggaggggaagcactgcagatgaaggttccagcccaagtctcaggagcctgagactgaccctcaggaaaggggagaagggaagtagagggagtaacagcggttcatgcgtgtgcacccctgggagcaggcacgggaaggagcgtgcacactcctgccaagacgcgtagatgtgggagcacacaaggggtagatggttgcgtgtttatgcactgcattctcgggtggaagcaggcggggcccagctgtccccaggcatcctctggtccctgtgggaagcgggaatggggagctgagccatgggtggtgactcagacttggctattttggggtcccagctggaagcagtgtagtgggcaaggctgtagctggagagggggtaggcaggcgggtaaagttggaactgagccctggtacctttctccctgccccctcttcctcatcctacaaaaggaaccaaggcagcaggggacacagtggggtaaagacaacctggcctcgcatctacccacggccccctctcatactcactcggtgagatgcccatcaatgccgctgaacagttcctgcagctcccccaggctgagaaccccatcggcaaagtaattctggaattcctcaaatgagagcttcccatcatctggggtggcagggggaggacagggagcagaggaggtatccctgaccctgactgcacccctgccaccaggtccagggtcccaaaggcctcatagcatctgacaaccatctagctaggtgagatgggagtctgaggtcagtggggggcctgactgttggggacaaaaggactggggtccttgaaggtgtccagtgaaggcaacagaacctactttgcaggcaccaaagggacagggcagtatgtacatagcgttgggtaggaactcagtaaatgtttgccaagtgaaaaaacaagcaacaggctgggacacggccacattgtggcagggcctagatgtcacctggaaggacttggggaccagcctcactgcagggcacaaggaacctccattctctggacccaggaccttcacagagaagccacggggaggcagatggaatcctcctactagttggagcctctgtaggcagcagcaggctggctcagaagggaatgagctccccatcacaggggcatgtaagcagaggctgggagtacttatgtgggacaaagacatgggatttggcctgaatgatgtgtgaggtctctgagcagatgggtgcggggagctgacccgggggaggatctgaacctccccagacagaactccctggtccaagtgagagcatgtgtcctgatcaatgggttgggacaaacaatccccatcaatttgaagagacccaaggagaaggggcaaagagtggggacaggaccccgtctctaggaggatgaaacacaagagggcgtgaagacccagatgaaaggagccccaggctgactgcgaagctcagaccctccacgggccacacagggcacagtgggctgctccaagtcatctagggggagcagcctgttgctggatgggtcccctagggctcctgctttagcttccaagtttctcccagaccagggtctgagactgcccaggacccaaggcaggaggagccgactcctttggcactggacccagctttatccttgcccaaggcgtgggtttagttgtgtcctccaagacctccctggtccagatggttggtcacatgacaagttactgagccctctaaaaacctgagtaaaatctccaaaaaggcctcatctccattacctcactcttccaagtgcctcacacaaggagcctgggattaaatgctgcaaagacccaagttcgagcctatcaattaaaggctgtgtgaccttaggcaacttgcttcacctctctggccctctgctcctttatgaaatagggtgaattccaatctagctggtggttgtgaggacaacagagggccacgtacaggaagtgcccatcaccatgccagggtgctgtgtgaaagtcagcccctatctccagtccgtggccaaaccacattctctccactctccatcctgccaaacttggctgagaacagcacttcctctgggaagtgccttgattgattctcctgttttgggcccccaagatttgtctcaactcttgacttcccacccaacctcccaactctccctgggcctcctggatgcctcccaccctgccccactgtgggacccaggggaagccacactcaccattcttgtctgctctgcggaaaacctagaggacaaagggacatagagagaactgtgagtgccacctgggaagccagaggcccccactcaacccgacagggtcccagctggccgacctaccccctgcctcgcctttcctcccgcccagcctggtcccaaaccacctgcccagctcagccctgcaggagcttttcctgcaagcggggcacaggaagagcacgcagcgggtgccacctctgctcacttctcctgcagggcctggcctcgtggggggtgctcctggccagtcccctgcgtccccacctcccacacccagagtgcagcccaagttctatctgatacatcagcccctggcacagttccagcttgaggaaggttgaggagatgggccaggttgtggcccaggaatcttgcacagccgtcctagacctgagccccgagctctgctgtgtggccatggtctaccccagctgccctctctgagctgtttccttgcgtgctgttgaaaaccaacagcaggcagtggctactctgtctctgcaggcgcctgagttacccactagcaaatagatcaggagcagctggggttaactctttcagggctggggcttcctatggggctgactctgaggaccttcggcaggcgtgtgtgtacacacacacgtccaagggggagtgggggtggcagaaggcaagttcggcagatttcatttatggagaagtggagatgaagagcaacagaggcagagaggagcagagtcaagacaggtccccgtctctcttagtgacctgctcccaggtcacccaaagcagcccagcaaaggggagactggcaggcctggcaagcaggggtgggccaagcctgggccgagagcccccatgaactccaggtcctgaacgccagccccctccagggtcctgttttgtcagggtcagtggggctcaggaaagactctaacctctagcctaactcagagaaggtctgccactggctgaggggcacgcagcaagccagggaggcccaggtagggtagatggagatcttgggagtgggcaggggtgctaagctgggaatggggacatctggggtcaccctattgtatccctgcctccatgactgacctgagacatatcccctcaggccttggttttcctacttgggaagaaggagggtcaggtcccttccagccagggctgtggtcaaggtgctgagtcactaggggcagtggggagggggtgggagacagctttgcctccctctggagttggggcatgagggggccaggacagagccgagcacagcggtgaacggtggagaaagggctcagggccgtggctggtgcccatggtggccgcagggccacccatggccccatgggagggtgactctgagcagcccttaccaactgtaggactctgctgccctggagtggggcctgaagaactctgggggcggcactagagtcaggagtgaggggcccttgcgtttccaggctccccttccccagtcagcccagcctggagctgccacagagtggggtgaccgctgctgtgattgtcgccagccccccgccaacaccagacacacaaatggggtgggctgaggggtgggaggcagcaggggcagtgacactggagcagggacaagaggagacatggagagacagaacaggtcacacaagggcagaaaggtcaagagaaaacagcagggccagagagaggggaagagacccagaaacagcggcggggcccgaacaaccccggagggtgagactaacagagactcgggtagggagacaccgcgagcagagcccgcgcccactcacgtcctggaagagcgtgtgtccggcgggccccgggtcgggcgcgagctgggggtgccgcggggtctggggctggggctggggcgcgggcggccggagcaggcacacggtgagcagccccgcgcacgccatggcgccgccacccgctcgggctcggctgcggttgctgccgaccctggacgccgcggcggactcggtgtggctagaggccgccccttggcgccggcgccgacgcgcgggctcaggccccgcccccgccccgcccccgcggacgccgggttccctcgcctcaaggtccaactccagcgccgcgggcctccgcgcttccgcggccacggcggagggggaggcgcccgagggctccggtcccgcgacggcctgtcgggagcagaacctaggggctgcgggcctacccagagggacaggatgaccaagccagtgccgaggtcagggtgacacaagtgggtaaaacccaccaggacttcaccttttggggcgtctgtatcctcatctacaaaaatggtactggcagacaccctatgcaattgttgggactcattcaatgtcaagtgcttacaacgggggctggcgcagaggaagcccacaggtccgtgcggccgaatcccaggcatcccgacgcccgccctctctggcactaagcgcagccctttcccctcccctccgtgactctggccctcccttcaacccgttctccacacagcagccggggggagcttttaagatgcgaaagaggaggtgtcacttcggtctccagtgactccttggcccctgaataaagcttaagactgaacgccccactccaggagcaccactctgaccctcacctcaggaccgcagccacactgctttctctccggtcctctatcccgctccctcctgcccaaggcctttgcccatcgtgtcctctgcttggtgttttcttcctctggttaactcctacttattttacagcgctcagcttaagcaccacccattccagaacgcctttcccgattttctcatttatgcagatctcctctttcagaccctgagagcaccatgaaaggaggtaacacccgtgtccccagaactgttaaatacctgacacagaaccagcccactgtatttgttacatgtttactaatgtccagaaacgtctggaaggaagacagcaaactgagcagagtggcctctggggctggggaaaggagaggccactcattactctgcacttcgggcagcactgaatagcattcttggctttctacaacaaaaacctttactggatctgcttttgagttaggaccaaaacagcgaggaagctgacctttcttcgagttatgaggctcaaatcaaatcgggcacggacagggagaagggaagtggagaatgggcatttccccagcaaccttggcctctcccgccccgaaatgttcccaacagagtcccaaaacccggcccaaacgtcatcaaaatatttattaaaaccaaagcaggagggaacagagctgttaggaagcaaatcaaagtgcagattggagggtggggcagagcagtggggaggcaggcgcttcagacactgcaggagggaccacagggtctgggctgggggaggccttcaccacccctcctgcccacatcagtgaaggtcccccactcacctctcccatctcatatccatcctggggggcagctggggccctgaactggccccctggagagggcccaccccaccatctgaccacccatggctgtcagtcagtctgtctccctccctcactttcccaataaataaatcacccaggcctcagttccttcagtatggggcagaagaacagctcagggacccctgcccttgctcaagggtagagggagttggggtatcaaccccacacccctcctcccctttgctgattccccaggctcaccaaagaggcctcgataaataaataacgctccattaaagcttcaatcagaaaaaacctttaagacagaagtgctctcaccgtcctacacgcccagccagccaaagcctccccacctggcctggtcagagcaccagattctgggagcaggcactgccctgggccttgtgggacccccagagcaaaagggccgaaagtgcagttagagcccccccacgcgcacacatggactcatgcacacacatgtggacacactggggcgtgtctgcagtgcacacacagaggtgtatgttcaccttcattccccggtacatgcacacacacatgctcacacacattcacccccggtacacacgtgtgggtgtaggctgcatgcacatacacaccacacagactccttcccttcctggcttgctcagcctcctagcggtagccagaccccagagctagaagcttctggagacagaggagaggggtataaattaaatgtttccaaacaggctgggaggacggccagggacagggggctccagggctgcagagacaaggtgagcatctctggaaaccctggtccctccaagccctgtcagaaatccaggggggtgaggtccccaaagtcacagtcgaagaggtctctgatgccctcgccctcctcgaggccgaagtggtagtcgagggcctcgtggggtggggaaaggctgatgaactcctcagggaggaggccggagaagtcctcccgcacatgctccaggagcgagtcggccgccaccagcggggacaggcggtcctcgtccacgggagcccgcaggctgcccatccgggacaacagcggttctggggagacggggagcatcacaggccggggatgccccagcagggaggaaggcaggggctgtcgtgcctgcccaccccccagaagaggggccctgccccaccccacccacctacccatcacccaccttgctccaggctgagtagagactggctgggatctgtggtgagggatgaggggggagatgatggtggtggtgacactatggtggcagagtcagtggccctgttctcctcctcagaagtgacctcctgggatggggtcttcccagggctgatcccacctacggtctcctcagggcacaggaaaacatcgatcgggccttgtttgctcttaagggagatctgaaagttctgggtggaagcagcaggcagggtaaactgaggcccaggtgaccaccagcccagcccagcccagcccagttgggcccggagttcccagatctcacctccgaagagtccacggcttggagctgggtctcaggaggggctttgatcaccataaccatctgctctgcagggtctgcaatgctacgaaggtcctgacacgtcacgtaggccagggttggcagagtcaaggaccacatgacctttgacttctagggggtcactcactccaacagctcacaaggcagggctcacacctgcctagtcactcctgtcctcccaacctcctacccactcaaaacctacctcacgcctgagtttcaagttccacatctgtataatgaaatcactctacccattgaatcccaaggtaataatggctaccgggaacgattccatgtaaaatgttcaacacaactccaggcctggtgctgggaatttattttttagaggcagggtctcgctatgtcacccaggctggagtgatgtggctcaaccagagctcactgcagcctcaaactcctgggctcaagtgatcctcccacctcagcctcttgaagcactaggattacaggcatgaaccaccgcacctagccacttttcttttttaatctgtacaatttcagaattggatattattattccccttttatagataaaactgaggccaagaggttaagcaatttatccagtgtcacaacagtgagaaaatgctgagccaggacttgcaaccaaaatcagagctctctcttaaatccaagcctctctagtcccacttgggtggagcccctgcctgctaagcctgccttccacaccctacggccaatccaaggatatcgctggctgtcagtgtcctcggagagcaggcgcagctgcgtagtacagatattcatcaggtggtccagctgctgctcgctctcctgcagctgtcggaggtcctgggtcaacccctcaagccgtccgccgacgcccactgtggtgtggctgcccctgtggggaggcaccagggagggtagggttaacagcgattggcccctctggccaggagccctgggcctcaggacagagtctgctgttgcctctgttctgtgaggcctaggcaagcccttgcttctgtctgggtctggctcctcagctgggctccaaatcagagtgtcatgggcttgaagtctggcccgaatataaacacctacatgtccctcaaccagggcgggataaacaaatgatgggactgacatgccacgaaatattacacatgcacacacacatgcatttccaagacatgctgtcaaatgaaaaaaaaaaaaaggctgggcttggtggcttatacctataatcccagcactttggggggctgaggccagaggattgcttgagcctcaggagtttgagaccagcctgggcaacacagtgagactctgcctctacacaaaatcaaagacattagccagacatggtggcatgtacttgtagtcctagctacaggtacggagcttgagcccaggaggttgaggctgcagtgagctgtatttgtgcctccatactccagcctgggcgacagagcaacaccctgtctcaaaccacccccctccacccaaaaaaccacaaaagatgcagaatggaacgatctaccaaaaaatgaaacggcaggtgtatcaaagaaagggtagtagcatgatgactggcgcgaaggcgagagggggaaaataaaacaagaataaaatatctatgccagacagatctcaccgagggcatgagaagccaggatagtggtgacctggcggtgtgaggggttggcaatgactggaaaggggcacaagagaaccttctagggtgttgaaaatgctcttatcttgatctgaatggtggcaacccagatgaataaatatataaagctgcgcggggcgcagtggctcatgcctgtaatcccagcactttgggaggctgaggcaggcagatcacctgagatcaggagttcgagaccagactggccaacatggtgaaaccccatttctactacaaatacaaaaagtagctgggcatggtggcaggcgcctgtatccccagctattcaggaggctgaggcaggagaagcacctgaacctgggaggtagaggttacagtgagctgagattacaccactgcactccagcctgggtgacagagtgaaactccatctaaaaaagaaaaaagtaaagctgcaactgaggtggatatgtaagatttgtgtgctttttaccatctatcatctcagggaagctacctctcctctctgagcccgtttccccagctataagatggggatgcaggcagccacagtgggtattactaccagctcctccaggctggcatgggcaggtgtgcctgccctcctgtgtggccggtacctacagccactggatgtggttcttggacttcttggcaatgagctggatgccctcaaggacgttggtgatgtcatagatgcgccgcttctgcaccttcagcacctcggcagcccagttcaggtcgacgacaccgtcagccgagtggctcagcagctccaggaagcgcttggtggtcagattcagtgaggtctcatagcgtgacttctcccccggggatttcacacctgtgggggtgtggtcaggcaagacagggcccttcagcatccacccccacctccagccaggcctgccactctggcagtgcagggcagcaggatgatgggggctgggggacagccagctccttccccttggcgaggccaaccacagcattcttcttctggctggggaactcctcacccctcagggcctggagaaaccaagccaggtggccactccaactgcccatcagggtcctcagaggcctggctcaagcccgacaagccagacgttagcttgcaagcatgtttgtctgttcacatccctaacctgggcctggtcacagggggtctgcccagcccaagctccataggtaccttttcctggatggcggcctctgccccgagctggcccactgctctcggccaggtactgatggtcagtttccaggtccagcctccgcttcacctgtggcgaaaacgggaggatgcccagtaaccaggagtgaggccagaagagacctggcttaaggctgggtgcctctgggctaccctcgcctcagtttctctagcaggatgcctgagtgtgtgactgagggagatcagaggggacatagcctgagagtcacagtcctaccacacaggacattccattttcaccacttctctggggtctagcggtggatttaaaacacatccgcaaactttctgatccttctccttcaaaagatatagcctaattctccccttatgagccagacctggtaacttgcttctggggatgaatgaatggaatgtggtggaagggatggcctgtcacttttgagactgggtcagaggcgctggagcttcctccttgctctgtattgggtcacttactctgccatatcatatgggcactcaagtagccctaatgatgggcaagaaaccatggcctcctcccaacagcaacacttagtcacaacttctgttagcagccagaacccaaacactggctgaatctccagagaccccaagccagagctggataagtcttccctgaattcctgacccacaaaaactatataataaatgtttgttgttttaaggcactatttttttttcttttttagacagggtatcgctctgttgactatgctggagtgcagtggtatgatcacaactctctgcagcctagacttcctgggctcaagcaatcctcccacctcagccttccaaacagctgggaccacaggcgcatccctccaagaccagctaacttttctatttctcgtagagatggggtctccctatgttgcccagactggtctcaaactcctaggctcaagcaattctcccatctcagccttcactgtagtcgtgctgggactagtcagccaccatgcccagctaagccactgattacataggtcccttggctaaatcaccttctctctggtttttgactaatctatacgcatggtagcagctggtgctcatcaagttccttgcatccattagttcattccattcaacggactggctgtataaaaatggccccattttccagataaggcaactaaagcccagggaggcccaggaagtggtagagtcaggatttgtacccaagacggtctgaggaagaacccaagctctaagcactctggcttagttcagacactccaggattgggactgtcctggaggtctcacaggctgctcaaaagtacccggaccaaaaccagactgatcttcccctccaccatccacagggtttcctgagctagagttcctgacctgtcaccctcctcacatgcagctaccaagaactgctcatcaccacggcgatcaccaccttcccagtgggctgctgagcagactccacactggtctccctgcctctgctgcagccagtcctcctacaaaccttaccatgccgccgcccctgcttaaggccttcctccagctccccattgcctttgtactctcatctgccactgcttctctagaggaacccgagtcacgttttcccagaaatctagactgcccttgcatccctcccaccctccccacttcacgcctgctccctctacctctgtgggcagaaaccttacgcatcagctaggaggtgtcacctcttctccctctgaactgcctcaaacccaaccttttgccacattctgtctctccctacacatttctgcagatgtatctatctcaccctcagaggtgtctgaatcacttgagaatctatagtgtctgccatggagcctggcatcaacaaatgtttgctgaatgaaccccccccatgctgatgaaccactccctcttgtgcacattcactgacttttgaaggcacccaggggaaagaagagctgttgtgctctaagcactgtgtactcaactgcttcccctgcaaccctccggccaccttttggcaggtgctatgatggcctccacctgagagaggccacacagtgagaggtggacccaggacttgcaccctagttggctggtacagagcccacactcatacccgccacgtgccccacctccccagaacccagccagaatgtatccccctccatactcgcccctggggcccaaaccctagcatgcttctgccatctgcaccccttgccttctccctgggatccccacccttgtccacccctgaaggcaggtcagtgccacgccctaaaacaaaggcttgagtggatgccatttctgccacttctccctagataaacactggcagaggggccccgaaacgcaggggtgaagacattcactgctgaaaaaatctggatgactcgaacacccatccatgaagggggtcacgaaagctgtgctttgtttagccccttgaacaccacgcagctgtcaaggaccgaggcaggttgacaagaatcccctcacacatacagacaagcaaaacactgtcacagggcgatatatttatatgatcccttttggattaaaaagctcatgaaacttttctctggttcagtttatattattatagaatacatttcggggcagcctctggaaggactgtgggagaccagtgccatatctgaatggtgtgaatgatacaggaaaaactacaatttttaaaactttaaaaaacaaaaactgtcacaaccaccacaaacaaaaatagccttagggaaaaaaaggaaaaaaatgaatagggctgggatcctgccgtcaactttctagtttcttaagagttaagtttttggccaggcgcagtggctcacgcctgtaatcctggcactttgggaggccgaggcgggcagatcacttgaggtcaggagttcaagaccagcctgaccaatatggtgaaacctcatctctaccaaaaatacaaaaattagccgggtatggtggtgcacgtctgtagtcccagctactcgggaggctgaggcagaagaatcgcttgaacccaggaggtagaggttgcggtgagccgagatggcgccactgtactccaacctaggtgacagagcgagacttcatctcaaaaaaaaaaaaaaaaaaaagagttaagagttaagttttcagctgggcatggtgactcacacctgtaatcccagcactttgagaggctgagacagtcagattgtctgaactcaggagttcaagaccagcctgggcaacatggcaagaccctctctctactaaaaatacaaaaattggctgggcatggtggtacacgcctgtaatcccagctactcgggaggctgaggcacagaatagcttgaacttgggaggcagaggttgcagtgagccgcaatcacgccactgcactccagcctgggtaacagaatgagaccctgtctccaaaaaaaaaataaataaataaataaaaaagttaagttttctacattaaacatgtattatagttataatacttgagtttgtggaagtggacaggcagggccaagaggaatggctgaattgcagagccttgtatacagaatgcctgctggtatagaagctaagcctgtagcttatttcaaggactgtgccagacaaatgccagtgcagagaggccaaaagccaaacctgtggactttctggacttcagttccagaatggtgccagcctcctggcccttaagtacactgggggccagggctccttgtctctgggcctagtgcctcctgggcattcactaactcaacaactgttgaatgaatggaatgcccaggccaatgagcctgcccctgacaggtggagtggagggcatttttctttgcccctgtccctccctttgatcctagaacccataatcctgttcagatctttgaggacaagaccctcaggttgttagatttccgcagacctgagccttctataatgcttgtcacacagctgaatggaagatgcttgcccaggtcccaagtggtacccacaggaacaggcccctggagtacaggagacaggccacctggcccacccctggtacaaccccctcccacccactcattaagagggagggcccctaaaagcccttcttgccctttcttcaacctgtatcagcatccccagaaagcaaggcatcccagaggtcaacctcagaggaaacgcagactgctctccccactcaagagcagaatgacatgggaagattctaacatctctaggcctcagcttcccaatctgtaaaaagggactgctgctgatggggttaaatgagttaattaagtaaagcgcttggcacagagcctggcacacaagacatcctcaaaacaatggtggctgctattgttattattattagcattgtggtgattccggaaggcagcactgggcatggggccaagggggttgggggagcctcctcaggatgcctcagggaccagctgccacccacacccccatcagcagttaggcagcttctacctccttgtcctgagtcctgcctcacccctcccacttgctccaagttccctgctgagaccccatcctgcctggccagaccccgcctgcacaccagagccccaccttcacccataggctgcgccagtcaaactggtctccacaccctgccctgtgccccacagttcccagctccaggcttctacgcctccaatcccttctcccactggaattcagccgcctcttctgggccctccagtctgaattcgtcttgagctcagcgatcagggagggctttattaaaggatctccctgagacattttctctcctggcactgggggcctcctctccagctcccagaggcccagcccacctagtccttctacagagactcaggggtcggcctgcctgattaatgaggttccatggcaaccagggcctgggagggtggagggtggcagatggaaggacaggcagagggaggggatcagcagctggtccagctgccccgcccctgcagagaaggcctcccagccaggagggctgtccccagaggcctggccggccaggcctgcacctggcagtcagcatcgaggcaggaaggagggtctcctcaatggctcaccaacggttaggccccaggactttcctccgccccgccttcacttcccctagcagctgtgctcactaccgagatgcaaattctgagctgaagccagcaggcctcagttcaaatcccagccccaccacctgcagccgtgtgaccaggggcaagtcactttccctctctgggcctcagttcctcctccgtcagatgggcacagtgacaacacagctcacagcggggttgtgagttttagctggcttgaagtcgcccaaaggcctggcatgcagtaaacgccagttgaatacacgtgggctattattatcactgagtccgacgctggggaggctccggtgaggaagctgaggcgcagagcacagagcagcaaacagggaccggcccgaggtcaccccgcaccccagggcggggcccggaggcccaaccccggctctgcaccgcccagcctgggcgcctcagtcaacccctcccccgccccctgccgcctccaggccaaacacggcgccctcccgggtctgcgcggggggcacaggcggcgctgtcggcgcggcgtccctggggtccgtaccggcgggcggccgagcgcgggccgcggcgcactgggtgtgggccggggcgcctgcggtgtggcgaagagcagcaggtcagggtcgcaggggccggcggcgggcgccgcggggccggtgggagccggcggggcgctggcgtcctgcgcggcggagatgatgacgatctgcgaggagtcgagcagccgcagcgcgccggccccgagcagggcctccagcgccggcgcgcatgggccgcccgcaggggccccggccaaggccatgacgctcacggcccgcgcggcccgggtgacaggcggcggcggcggcgcgggcccatggcggcaggcctcggcgagggctcgatcccgctccgcccccggccgccgctgcctgcaaagtcccggccacttttacgcgccaaatcctttttgccgcgaaagagccacgagccgccgagcgccgccacaattggctgccccggccgtgacgggaacaacggcggcggttcctattggctttaacgcgccggacccggcggcgaggggcgggatggggcggcggcgcggggcggtacggccaatggcggggcggggcgcgcgcaggctttgtccggatggtaccaggcgcggtgtgactccccgcccccagcccgggcgtcccctgctggaggcgtggggacaccggaacataggccccgccccgccccgacgctcccgcatcccactgacctttctatagtgcaggttcagaacagagcctctcttctgcacgtgaccctcaacctgtagcccccaacagcctcagcttagatttccagagactgtcccctcttcttttcaggatcatcagttccacagcccagccatcagccacctcttccatcctcaacttgcctcacccatgacattatcctaatcctgcacccagccctatcccgctcacccagagcccaagctgaagagcggtgcctggaaatggcgagggggacgtcgggctttcctgcaagtcccattttagccaaaatctccaacagccaacgtatagcatctgcttgaactcattcattccctcactcattcaacaaacgtttggagagcttgctctgtgccccatcctcaattcgtggccctaaggagctcacagtccagtagacaggggaacagaaaggtaacagacgtttacaatacgatgaagtggcgtctgggcgcggtggctcaccaccggaatccctgtaatcagctggcggggtggatcgcatgagcccaggagttcgagaccagcctgatcaacatggtgaagacccatctctacaaaaaatacaaaaattagccaggcatggtggcgtgtgcccgtagtcccagctacttgggaggctgaggtgggaggattgcttgagcccgagaagtcgaggctgcagtgagctatgatcatgccactgcacaccagcctgggcgacagagcgagatcctgtctctaaaacaaaaaaagaaaacacatcacttctagggagccctcccaaggatttactcacttcctctattgcccactgctgcctctgctccaatgctgaccacacacactccttttctccatctgcctcccctgccaatctaggagctcagtagcgactcctcccaacactggtctggcccagagcaggcgctgagaaaggttatgaaagaaacagaggctaagccagaggctgcctagactgtgacaaggagaccacggttctgcaagggtggtccttaggccactggcttcagaaccacgtggtcacttgctaattttgggcccaccctggccctgccaatttaaaatctctaggtgcccaagaatctgcattttaacaatgccatgtcccctttccaggtgatatttgttattctttttctttttttttttttgacacttagggaattagaaaagccagtatcttattttttttttcctatttattttatatagacgaggtctcactatgttgcccagggtagtctcaaacccctgggctcaagagatcctcccgcctcagcctccagcatagctggtactccaggtgactgccacctcaccaagcttccaggttatttttatgcatactcacatttgaaagcaaactggtgtaccagcataatcaaaatgagtggtgcagcctcaaatcacagctcctgaggatgcttctcacccttagtttcaaatgggcacacagaccttgccctggccccttccagggttgccaggagaatgaaaagcataaggaattggaaagtgttttacaaactatgaggtggtttaggaaatcaggagttgttttcccctccaatgagtagtttctgaaattactcattgcaaatcctagaatgtatcatagctagaagggaccacagagaccacataagcctcttgctgtatggataggaaaactgaggccctttcaggagaaagtaactgtgaagccaaccagtgaccaaattgggcctacactgcattcccagccctgaggtctgcctgtcccccttccccatcccctctccataaagaagctgaggggtaggtcccattctaaacaaccaacgcaggtgctggcagagagcaagagaaaccagcacattcccattccagatggaaagagtgtcctttccctgcaccttcccacagggtcccagtaacactaacattcatttgtgtgaagccctctcaaacccaagtcattcaacaaacacttattaagcacctattatataccaagcactgtgctggtttaactgtggtggctggcaaagagagatgtctattattattgctccattttatgatgaggaaatttgaggccaaaagggcctgagtttaccaagtagatgaaaaggttatttttcaggcttggtgaggctgaggttgggggttttccaaagtcctgcccgccccagagtattcaagtacacatccaggtagaagtaggcgccctccgtcccacaatccttcaggtcctgctgaagcagaaaggagtgaagaccagcattcctagcatgaaactgaggaagagataagggccttctgtacctattaatacctacttgaaagcagaaaagcctgatagatgaggccccttggccctaagcctggcagctcctgataaggctgttctcaatgtcaacagttttcaaaaaacagtttccaaaaaatccacagtcactgggcagccacttccattgatgatctcctttcaaccccataatcccgtaagtaagcttgtttatccacatggtgcaggaaggaagaggctcagagaggggcattcatagctcaaggtcacacagcagaactgagatgagaacttcacttgtcccactgcaaaacccaggacctgcccttgccaccctctgtaaataccccaaaagccaggctcagggctgtcaagattataaagtgtagtttctaaagggtattatggtggatagtggcttggttcataggtgcttatttccatcaccaccttcaccaaccaaactagaggagttcgaggggatgcaatctgttgggcccacaatcctgtgcctggagacctctttcccttggttctttccaagaagcagagtggtgtagaggtgatagcatgggcttctaaatcaggtgggtgtaatcagaaatcttggtcaacatgaccttggacaagtcaattcacttcattcaatccacagatatttactgagcacctattatgtgtcagacattgtgctaggtgctggggacacagttataagtaaaacagacccctggaactcacagtccagtgggaaagttaggaattatttctctgtcactgcacagtatgcttgttaagaagtttgacaagtgacacaaataatttaaacctatttattccacaaacagcacctcccctaagcatacattcttagcttacaaaaaaacaaaaattcaccaaacatgaatatccagtcatgataaggaatgcataattgggagaaaagattctgtgatgacttaattttatgaagggcacagagatgtccattgttgagttgtggcagagggaggtggggagttttgcatctgcaacaatccctcaatgctaccctgactgacagtttactgtccctggagatattctgtcactgtgccagttctggctatatctgaacagacctcttgcccatccaaaaggcagtctaacatagaaacaagcctttggagtcgggtggcccccaaccctgtggcttcccgcctctgtgatcttggggaagtgattcaccctcttgaagagctttgcttgcctcatctgcagaacaacagataacagcttctttacacgatgcgtgtcaaagtttaagaaaacaaaacaagcagagtttgcaaactggcccccagatataactcaatttgcccatagaagatttttcttgaattatgaatttgttttaagatttgaggaaattggaaaataccatataaaaattaacatgtctggcttttctttctcttttcttttttttttttgagacggagtttcactattgttgcccaggctggagtgcagtggtgtgatctcggctcaccacaacctccgcctcccgggttcaagtgattctcctgcctcagcctccccagtagctgggattacaggcgcctgccaccaagcccggctaattttgtatctttagtaaagacggggtttctccatgttggtcaggctgttctcgaactcctgacctcaggtgatccgcccgcctcgggttcccaaagtgctgggattataagcgtaagccaccgtgcctggcctctttttttttttcttttgaaatgggagtctccctgtcacccaggctgaagtgccgtggcgtgatctcagctcactgcaacctccgtctcccaggttctggcaattctcctgcttcagcctcccaagtagctgggattacaggtgtgtgccaccataccaggctaatttttgtatttttagtagagacggggtttcaccatgttggccaggctggtctggaactcctgacctcagatgatccacccgcctcggcctcccaaagtgctgggattacaggcgtgagccaccacgcttggcctctggctttcttttcaaacagcagtatctggctatactggccaggccatcacggtgctaaacagttgttgtcccccagctagcgagggccttaccctccaggccaccagagtccttccctggcatgcctcactcagttcttgccctgccattccagggatgaacagccacccctcatgtacagtgcctggcacagagtgagcacccaaaaaatgtgagctgctgttagtcttattaccgccaaggaactgactggtaccagcacagcttctctgccttgcaagtaaccaaagataacatatggacaggccgggtgtcgtggcccatgcctgtaattccagcactttgggaggccgaggcaggtggatcatctgaggtcaggagttcgagaccagcctggccaacatggtgaaaccccgtctctactaaaaatacaaaaattagctgggcgtggtggtgggcacctgtaatcccagctacacaggtggctgaggcaggagaattgctggaacctgggaggcagaggttgcagtgagccaagactacaccattgcattccagtctgggcaacaagagtgaaactccatctaaaaacaaacaaacaaacaacaacaacaacaaaaacatggacatagaagagagggaaaagtggatattcgtggctgggtgcggtggctcacgcctgtaattccagcactttgggaagccgaggtgggtggatcacctgaggtcaggagttcgagagcagcctgaccaacatggtgaaaccccatctctattaaaaatacaaaaattagctgggtgtggtggcaggcgactgtaatcccagcaacttgggaggctgaggcaggagaatcacttgaaccggggaggtggaggttgtagtgagccaagatcaagccattgcactccagcctgggtgacagagtgagactccatctcaaaaaaaaaaaaaaaaaggcagatatttgtaatcaaacagcagacagggggtttggtgccagccagcagcctggctgtgtggccttggccaagtccttcaccatcagttggcccatatgttccgtgggttcaggccagagggtctgaggtccaaggtaactgcataggtctcagtcgattctcaagtctccccccagccctggtcactctctgagtgcacgctctggggacctcccttctctccaagcctcacccatggcaacttcctttctctgcgtcacccaagcctctcaggaggggtcatgcttttccaaggagtggggcgaaaccggacatatgactatgcctcctctgaccagggccacagcgaaggtgggagtaggaggcctttacagttgaggggctcagttttttcatctgtaaaatagtgatgataataatcatagtgtttacctgatggagttgttaggacattgagttattaacatgcctggcacatagggagagctcaatgaatgtcagctgttgtgaagagtgcagaatgactccctgaagtggcttgcctacactcccctctcaatttttcctctgaagaaatgcttcttgctgggcgcaatggctcacgcctgtaatcccagcactttgggaggccaaggcgggtggatcacctgaggtcaggagttcgagactagcctggccaacatggcgaaaccccatctctactaaaagtacaaaaattagccgggcgtggtggcagacgcctgtaatcccagctactcaggaggctgaggcaggagaatcgcttgagcctgggaggaggaggttgcagtgagccaagatcacgccaattgcactccagtctgggcgacagagcaaaattctgtctcataaaaaaacaaaacaataaaaaaattagctggttgtggtggcacacacctgtaatcccagctacttgggaggctgaagcaggagagttgcttgaacccagcaagtggagatggcagtgagctgagatcgcgccactgcactccagcctaggtgacagaatgagactctgtctcaaaaaaaaaaaaaaaaacagaaaaaaacgaaaaacttgttaggctgcagaatagcagaattttcatgaagcaattcctgcactgcctcccacattctattagccacaaggaggaaaaaaaaaaaactatgtttggagggcaacgaagcgtgtaaaatgaaataataccatattccattgattctgacaccttttctttcatattttaacctctctgaaattgaggtgcatcctaggatcagtggaatatccatttgtagtcagtaactatttttcttaggggctcaaaacggcatatctcatattggatggcatcttagaagtgacaagctgtggtgtacaaaaagtgccaggctcagggcccgccacgtcacaggccctcaggttgtcctcatgaccttcagcatccccagcacattcgaggctggtcatggtggagtgatcagcttttctttctttttgtcattttctcactgacacctgctgacctgcatttggtccccggcttgacaggcacatggcaaatgcagtcagggaggcatatggggagggctcaggatgggaagagaaagactttttataatatattaagatattcaaagaggaggagccagagattctttttttaaaaaacaaacaaacaaacaaaaaaatccccgctggaagccagagttatatatatgccacacaggccaggaaacccagcaggcctcctggagctggcagcaaaccgaaacaggggtattgtgtccaggccactggctggctgagggacattgttagggccttgccctgtctgggaaaaggggggtggcggggcagggggagtgtgttcccatgactccctggggagtaacaacaattgggccagctgggaagccggggatgccaggggcccagtgggcaggaggtaggcccccgaggggccatggagggcactgcggaggctgaggaggtggggtgcgggggaaggaaggtcagggtctgtttcttagctgggaggcaaggcctaggaggggaaacatgggcgtccttcactacacccctccctcaccccctccaaagccctgggccactgtgtctctctcgaaagtgcaccccagatgtgcccactcttctctacctctgtcgtcacccaccctggtctccctgcaggaccaccacgtggcttcctcactgggatgtatgccaccggcctggctcctacactctgttctatacatgaactagaaggatcttcccccaacataacccacatcacgtcactctcgtctatacctgccacaggctgcccgccacacttagaaaaaaagccagaccccttgccctggcccatgaagcctgcctggtggatccagctggcctccggcttcatctccagtgagccccacccctgcactcagtcagccaggctggccccttcccagccttggaatgccttggcctgctccctcctcaaagcctgtgcacttgcagaactcttgattggaacgctcttcctccaggcttgcagagctccccccttggtattcagggctcagagcaaacatcacctcctcagagaggccttccccggaaaacagcctcccattctctcctcccaagccccctctatcacactgccctgtatgacttcatggcaccccccaccctccaaagttctggaatgtggtcatcattggtcagtcttccctccttaggctatgagccccacgtgggaactgctttcttttgtcactgaatcctggcctccaccaccacctggcactttctaagaactcagccaacattagctagtatttgtatgattcctgtgctcagggcttggtaaaccatgccagctgcggctgggcacggtggctcatgtctgtaatcccagcactttgggaggccaaggcgggtggatcacttgaggccggcagttcaagaccagtctggccgacatggtgaaaacccgtctgtactacaaatacaaaaattagctgggcgtggtggcacttgcctgtaatcccagctacacaggaggctgaggcaggaggatcacttgaatgcgggagacaaagtttgcactgagctgagatcacaccacagcactccagcctgggaaagagaatgagaccccttctcaaaaaaaaaaaaaaaaaaaaacaacccaaaaaaaggcacaatgcccgctgctatgtggtcaggtggggaaggctactcttttttttttttttgagacagagtttcactcttgttgcccaggctggagtgcagtggtgcgatctcagctcactgcaacctccgcctaccaggttcaaacattctcctgcctcagcctccctggtagctgcgattacaggcatgtgccaccacacccggctaattttgtatttttagtagagacggggtttctccatgttggtcaggctgatctcaaactcctgacctcaggtgatccgcctgcctcggcctcccaaagtgctgggattacaggcgtgagccaccgtgcctggccggggaaggctactcttgagcagggagtcagaatctgggacccatggaccccaagttccatgaacttagacagaaaaaaaattacatttttattttcactagactctaactgaaatggaacatttcgttccattttgaatgtaggcaacaaaccagacgactgttggcagcacgtgggactttgtccccaatagaaatcacagctgtttccatctcccctcccagtgctgtgggtaccctgggatatgctcatgcctatcctacctctgaaatcatggccattttgaacctgatgctagatctttttattttatttatttatttattttgagacgaagtctcgctcttgtccccaggctggggtgcaatttcgcgatcttgactcactgcaacctccacctcccagattcaagcaattatcctgcctcagcctcccgagtagctgagactacaggcatgtgccaccacgtccagctaatttttgtatttttagtagagatggggtttcaccatgttggccaatctggtctcgaactcctgacctcaggtgatctacctgcctcagcctcccaaagtgctgggattacaggcgtgagccactgtgcctggccagatgttgttatttaatgtgttaaagaaagaacatggccgggcacggtggctcatgcctgtaatcccagcactttgggaggctgaggcagcgaatcaagaggtcaagaaatcaagaccagcctggccaacatggtgaaaccccgtctctacttaaaatacaaaaattagctgggcgtggtggcacacgcctgtagtcccagctagttgggaggctgaggcaggagaatcgcttgaacctgggaggcgaaggttgcaatgagcctcaatcgcaccactgcactccagcctggcaacagagtaagactccatctcaaaaataaataaataaaaataaaaaggagtgtcctaaaggagctgatgtggtctggccctgatccttctcccagctgacatccagcccacaaggagaagctggagggagaggccagaagagcaatgagaatgaggtttctgtcgcagacactgggacccacacttgcattccgcctggcttctgtcttgtttattaaattatgacatctgcagcagctttgagcacagagtcccagcacagaaaacaggtcccctccgttcagaagccctttctcagaacaacactcagaagagagctcagctctccctctgtcttctttattttttaattaatttcatttttattttttatctaaaggattacatgatcatcatctccctctgtcttctatctgggcagcacgagagtgggtcccactctacagggcaccctctgctgaaaatcaaaacttgctcaccccaaatgcccttcaaggctgaactaagacaaactctccccctgtgaatctggaacgagacaagcggaggaaaaaaaatttatttttataaagatcctcaaatttgtcatagaaagcaacccatctgaagtcacaaattgtggtgacgtgggcttcgttttgagaggttgagtacagcatggtgttctggtttaggagagagccacgttcaaagtctgattcttatacaccccaaatgcactcatggagaggtaaaagtgaacaatgtggaaggaaacactgtcactagaatcccttctgcagcttcagtgtggaaggctgcagcggcgagcatcaaacaaggcagcttcttggcgtctgggcctgtgagtcaccgcgctcacatgggttcacttagcatctctaatttgggagcagagcagcagaagaggcccaaattaacttgagttttgtccttccccttttacttggagttctgtgggcctgaatgcttggtgtcatctactgtaaggctcaggacacctggggccatcgtcttcacactgatcacggcaaggatctgcccaagatatttgggagaggaagctgtcaggggcgtagggggaaaacaggctcaaagaaaggactcacttttatattggattattgatcaaagagatcgccgaacacacagaggacaaggaagaaatgccaaagagttgagatgacattgcaatgtaaaagtttcttttaagataaaaataggtggctgtgcatagaatattccaggaaggctgtatgagaaagtgctaacagtgggtgccccagcaaaggaagggcctagggatgcagcacaggtgtaggaaggaacctgacttttccctgttacacacttttttttttttttcagacaaagtctcgctctgtcacccaggctggagtgcaggggtgtggtctcggctcactgcaacctccacctcccaggttcaagcgatcctcccaactcagcctcccaagtagctgggattacaggcgcacaccaccatacctagctaatctttgtatttttagtagagacagggtttcaccatgttggccagctggtgttgacctcctgacctaaagtgatccgcctgcctcggcctcccaaagtgctgggattacaggtgagagccaccatgcccggcccttttctttgcagggggcggggaaagggtctcactctgtcacccagactggagtgcaatggcatgatcacagctcactgcagcctcaacctcccgggttcaggtgatcctcccacctcagcctccccatggtgtacatgccaccataccaggctaattgtaatttttatagagacagggtctccctcttgcccaggctggtcttgaactcctgggctccagcaatgagcctgcttcaggctcccaaagtgttaggattatagcgtgagccactatgctggctatcaactttttataactttgagttttgtactatgtgtagtattgatttaaaaatattttttctgctctcgctctcgctctcgctctccctctccctctctttccacggtctccctctgatgccgagcggaagctggactgtactgctgccatctaggctcactgcaacctccctgcctgattctcctgcctcagcctgccgagtgcctgcaattgcaggcgcgcgcagccacgcctgactggttttcgtatttttttggtggagacggggtttcactgtgttggccgggctggtttccatctcctaaccgcgagtgatccgccagcctcggcctccggaggtgccgggattgcagacggtgtctggttcactcagtgctcaatggtgcccaggctggagtgcagtggcgtgatctcggctcgctacaacctccacctcccagccgcctgccttggcctcccaaagtgccgagagtgcagcctctgcccggccgccaccccgtctgggaagtgaggagcgtctctgcctggccgcccatcgtctgggacgtgaggaggccctctgcctggctgcccagtctggaaagtgaggagcgtctctgcccggccgccatcccatctaggaagtgaggagcgcctcttcccggccgccatcccatctaggaagtgaggagtggctctgcccggccgcccattatctgagatgtgcagagcgcctctgccccgccgccccgccccgtctgggatgtgaggagcgcctctgcccggccacaaccccgtctgggaggtgaggagcgtctctgcccagccgccccgtctgagaagtgaggagaccctctgcctggcaaccgccccgtctgagaagtgaggagcccctccgcccggcagccaccccatctgggaagtgaggagcgtctctgcccggcagccaccccgtccgggagggaggtgggggtcagcccccgccaggccagccgccccgtctgggagggaggtgggggggggtcagccccccgcccggccagcctccctgtccgggagggaggtggggggtgtcagccccccgcccggccagccgccccgtccgggagggagttgggggggtcagccccccgcccggccggccgccccgtccgggagggaggtgggggggtcagccccccgcccggccagctgcctcgtccgggaggtgaggggcgcctctgcccggccgcccctactgggaaatgaggagcccctctgcccggccagccgccccatccgggagggaggtgggggggtcagccccccgcccggccagccgccccgtccaggagggaggtggggggtcagccccccgcctggccagccgcctcgtccgggaggtgaggggcgcctctgcccggccgcccctactgggaaatgaggagcccctctgcccggccagccgccccatccgggagggaggtgggggggtcagccccccgcccggccagccgccccgtccaggagggaggtggggggtcagccccccgcctggccagccgcctcgtccgggaggtgaggggcgcctctgcccggccgcccctactgggaaatgaggagcccctctgcccggccagccgccccatccgggagggaggtgggggggtcagccccccgcccggccagccgccccgtccgggagggaggtgggggtcagccccccgcccggccagtcgcctcgtccgggaggtgaggggcgcctctgcctggccacccctactgggaagtgaggagcccctctgcccggccaccaccccgtctgggaggtgtacccaacagctcattgagaacgggccatgatgacaatggcggttttgtggaatagaaaggggggaaaggtggggaaaagattgagaaatcggatggttgccgtgtctgtgcagaaagaagtagacatgggagacttttcattttgttatgtactaagaaaaattcttctgccttgggatcctgttgatctgtgaccttacccccaaccctgtgctctctgaaacaggtgctgtgtccactcaggattaaatgggtcggtgcaagatgtgctttgttaaacagatgcttgaaggcagcatgctcgttaagagtcatcaccactccctaatctcaagtacccagggacacaaacactgcggaaggccgcagggtcctctgcctaggaaaaccagagacctttgttcacttgtttatctgctgaccttccctccactattgtcctatgaccctgctaaatccccctctgcgagaaacacccaagaatgatcaataaaaaaaaaaaaaagaatttaaaaaaaaatatattttttcctctccctctccctctccccacggtctccctctccctctccccacagtctccctctccctctctttccacggtcttcctctgatgccgagccaaggctggactgtgctgccgccgtctcggctcactgcggccttcctgcctggttctcctgcctcagcctgccgagtgcctgcgattgcgggccgcaccgccacccctgactggttttcgtatttttttggtggagacgggttttcgctgtgttggccgggctggtctccagctcctgaccgcaagtgatccgccagcctcggcctcccgaggtgccgggattgcagacggagtgctcagtgctcagtggtgcccaggctggagtgcagtggcgtgatctcggctcgctacagcctccacctcccagccgcctgccttggcctcccaaagtgccgagattgcagcctctgcctggccgccaccccgtctgggaggtggggagcgtctctgcctggccacccatcgtctgggatgtgaggagcccctctgcctggctgcccagtctcgaaagtggggagcgtctctgcccggccgccatcccatctaggaagtgaggagcggctctgccctcccgcccatcgtctgagctgtggggagcgcctctgccctgctgccccgtctgggatgtgaggagcgcctctgcccggccgcgaccccgtctgggaggtgaggagtgtctctgcccagccgccccgtctgggaagtgaggagcccctccgcccggcagccgccccgtctgagaagtgaggagcccctccgccgggcagccaccccatctgggaagtgaggagcgtctccgcccggcagccaccccgtccgggagggtggtgggggtcagcccccgcccggctggccgccccgtccgggagggaggtgggggggtcagccccccgacccggccggccgccccgtctgggagggaggtgggggggtcagccccccgcccggccggccaccccatccgggaggtgaggggcgcctctgcccggccgcccctactgggaagtgaggagcccctctgcccggccgccaccccgtctgggaggtgtgcccagcggctcattgggaacgggccatgatgacaatggtggttttgtggagtagaggagggggaagggtggggagaagattgagaagtcggatggttgctgtgtctgtgtggaggggggtggacatgggagacttttcactttgttctgtggtaggaaaggttcttctgccttgggatcctgttgatctatgaccttgcccccagccctgtgctctctggaacatgtgctgtgtccactcagggttgggtggattgagggcggtgcaggatgtgctttgttgggcagatgcttgagggcagcatgctcgttgacagtcatcaccactccctagtctcgggtgcccagggacacagacactgcggagagccgcagggtcctctgcctgggaagaccagagacctttgttcacttgtttgtctgctgaccttcccttcactgttgtcctatgaccctgcggaatccccctttgcgagaaacacccaagagtgatcaatggaaaaaaaaaaaaaaacaaagaaaaaaggaacagaagcaaatgtggcaacatcttgataactgttggaactggacgttgggtacatggggttcattaaactcttttctctaaaaaaaaaaaaaaaaaatatttttttaggctgggcgtggtggctcatgcctataatctcagcactttgggaggctgaggtgggcggatcatgaggtcaggagatcgagaccatcctggctaccatgatgaaaccccatcgctactaaaaaaaaatgaaaaaattagccgggcatggtggcaggcgcctgtagtcccagctactcgggaggctgaggcaggagaatggcatgaacctgggaggaggagcttgccatgagccgagatcgcgccactgcactccagcctgggcgacagtgcgagactccatctcaaaatatatacacatatatatttatttatttatttatttattttagtcttacatgtcaaaagaattaacaggattgtagcaggtgtttagtaagtagaggttaaaccattctatttcaggaactagcatttaggaagcatagcacttactgtgcaacaagagccctctggccatccctgttttacaggtcttagagaatggagggcagctaggaaggagccaaatgggactcctctcagatctgctggaaggcagagccctgctccccggcacagaccacactgccttcctccctggagtgtgcagttggaagcaccagatgctctagcagcatccagagagatgccatctgtgagggaaacctattcttagagagcagagacagtcggtagcggagttggccaacccccagcagcagtggcgggacttcaggagggcaggcggccaaggtttcaccttcagctgggggcaggacaggctaaaagcagggtgtgctcagtcctcaggggcacacttcctctacatttggatgctcttagaaataacagcatttattggggactcactttaactgtgtcatattctttaaccctccacaccactcgatgaggtgtgtgctacgacaacgcctactttatcaatgaggaaatagaggcacagaatggctcagtcacttgcccaaggaaactgtggggccagggcttgagcccaggcactctggctccaaagcctatgtccctgaccaccatgctatattgcctctcaacctgctgtacagaggccagttttagtttgggttcccccaatagcagactctaagacaagggtttgagtgcaagtggttcatatgggaagtggtcccaggaagcactggtaggggcatgaggaagggagatggggagggtgtttgaggctcagccctgctgggcggccctgggagtcagtgtggagcacgcacctctgagttatcccacccgaggggtgagggatgcgggctgtgggagtgggggtatttatcagtcattggttgaaggttgctccaaggatgtgttcattctccagcccttcaggcctgccagaggctggcaaaggaggcaccagtgacaagctagagtcctcaggcagaaagacagaggggcggccactggcaaagctggctagtgtgcaccagagtcgttatttagaggagctataggcagggcacccccaccatctgctataaaacctgcctggtgatggcccaagccctctgccctccccaacccctagagcagcagtccccaacctttttggcaccagggaccagttttggggaagataatttttccacggaccactggggaggggacgtggtttcaggatgattcaagcacattgcatttactgtggattttatttctattattattaccttgtaatatataatgaaataattgtacaacacaccataatgtagaatcagtgggagccctgagtttgttttccagcaactagacagtcccatcaaggcgtgacgggagacagtgacagatcatcaggcattagattctcataaggagcatgcaacctagatcccttgcatgcgcagttcacaatagggtttgcattcctacgagcatctaatgccaccactgatctgacagaaggcagagctcaggtggtaatgtgagcagtggggagtggctgtacatacagatgaagcttcgctagctcacccacctttcaactcctgctgcgtggcctggttccgaacaggccatggaccggtaccggggttgcggaccccttactctagagctcattcaacctccacagcaagttaaaggaacttcataattacctactccaagtttgcagtaaatgttgtggctgaaaacacagcttacagaatcagactgatcccacctcaattacctaagggctctgtgactcatttgtcagatgggataataatggacggctccatatcattccccacccccttgttactcagagcagcaccactggcagcaccagggagcctgggagaaatgcagactctcaggccccaccccagctcactgaatcagaagctgcattttaataaggtctccagtgactcctgcatacatttctactagtaacttctaaaatatagaaagagtgatggagtaagtatattaatgaaagtgtatctaccagaccaatggtctcaaattggtagcccatggaccagattttcctggagacttgtttgatttgtccaggattgtgtttttttttttttttttttttttgagacagagtcttactctgtcacccaggctgaagtgtaatggaactatctcggctcacagcagccccccaggttcaagagattctcccacctcagcctcccaagtagctggaattacaggtgcctgccaccatgtccagctaatttttgtatttttagtagagacaggatttcgccatgttggccaggctggtctcgaactcctgacctcaggtgatccacccgcctcggcctcccaaagtgctgggattacaggtgcaagccaccgtgcctggtctaggatcgtggtttcgaaaaaagcagacttggccaggcatggtggctcacacctgtaatcccagcattttgggaggccaaggtgggtggatcatgaggtcaggagattgagaccatcctggctaacacggtgaaaccccatctctactaaaaatacaaaaaattagccgggtgtggtggcgggcacctgtaggcccagctactccggaggctgaggcaggagaatggtgtaagtaaacctgggaggcagagcttgcagtgagccaagatcgcgccactgcactccagcctgggcgagagagcaagactctgtctcaaaaaaaaaaaaaaaagaaaaaatcagactggtacacaagtctccagttccctatgtccccatcactcctcatcgcatagcactatgtcattgtaggcccctatgggcatttgaatgtgtacccctttctggcccatatcctataatgagctaacatttgcatagcatggcttaggtttctaaatttgaaacaaggcactggaaaaaacatgggctttgaaatcagacgaatctgagttcaaatcttgattcggctgttatactagctgtattaccttgggcaagttactctcctctctgattctcagtttcttttcttttctttttttattttttttttagacacagtctcgctctgtggcccaggctggagtgcagtcgtgcgatctcagctcactgcagcctctgcctcccaggttcaagcgattctcctgcctcagcctccccagtagctgggattacagggacgtgccaccatgcctggctaatttttgtatttttagtagagatggggttttaccatgttggccaggctggtcaagaactcctgatctcaggttatctgcctgcctcagcctcccaaagtgctgggattacaggcgtgagccactgcacctggcctgaccctcagtttctacatctgtaaaatggggacgaaaacacacatttgcaaggccactgtatggtttaaaaataatatgtgcaggctaggggcagtggctcatgcctgtaatcatggcactttgggagactgaggcaggaagattgcttgaggctaggaggtcgagactagccctagtgacagagcgagaccctgtcgctacttaaaaaaaaaaaataataataatatgtggaaaacacccaagtggaagtatgaatgcactaaatgaaagtaattagtagcacatcagtggtagttgcacaagtccagtgaggaccacggcattatgattatcctcattttatgataaattgaggctctgagaggtccagaaccttccccaaggttacacagtgggggagtggggactcaaacccatgtcctctagctctagatctgcactgtccactagaataatctgtgaggatacaagtgttccatatctgtgttgcccgtcacagcagccactagccacatgtggctactgggtcctgaaaatgtgggtggcaaaatatacacccaattttgaatacttaatacaaaaaagagtacaaaatatctaatgatgttaattatatgttgaaataacttttagaaatttgtgttaaaatatatagtgaagattaatctcaccttttttttttctttggtgagacagggtctcactgtcgcccaggctggagtgcagtggcgtgatctttgctcactgtagcctcgacctcataggctcaagtgatcctcccacctcagctggaaccacaggtgatggaacccggctaattttttgtattttttgtagaaactgggtttcaccatgttgcccaggctggtctcaagctcctgagctcaagtgatccacctgcctcagcctcccaaagttctgagattacaggagtgagccacagtgcccaggcttcttttttgtaatgcagctactagaaacattttaattacatatatggctcacgtgtttctattggacagtgggaatctagaacttctccagtagaacagcatctgagataaggaacttagtgttttttaaaaagtatttacaacccactgcccaccagcaaggagccctctgtgacataagaacagttgaagaatgaacatacccaccggaaagagacctcagggccctcctctgagctccttgacccctgaggcctagagagtagtgtggctggccccagtctcacagaagtcagctgcacagctggaaccaagccgtagattcctcagcctgattcggccacttgtgccaccatacaaaggtacccactgggattttaaaatcagtgtttttacttcagcaaacggaaccctgggataacaccagttggagtctgaggcctatgatcttgagaaggcagtatcctttgggagggtctgcatggggccaaatcttgagccacagccagacacctcagggctgcattaattggagggacggctcttgttatagacgaggaagtctgagatgtcgtgccatacattgctgtcctcatagaggtaggtcatggaggactgcagcgagggctgcagggtggatcggtgatactcaaagagccacagcaccagcccccacaccaccgcagtgagcagcgggaacgggtcccacctgggttcagggatgtagcccttctctacagccaggcggctcagggcaaacaggacgcgtgacaacaggtacatgttgatctgcaaagagggaatgatgggaattactggtgatcaatagtgatgtccctcttttgtttttgatattaataatttgtttcatttctctttttttcttagagagcctggctaggggtttatttattttaattatctcttcaaagaatcaacttttggtttaggtccttttctctattgatttcctgtttgcaatttcattgatttctgtactaattttttttttttttttctgagacagaatctggctctgtcggctaggctagagagagtgggcttactggatctcggctcactgcaacctccacctcctaggttcaagtgattctcctgcctcagcctccggagtagctgggattacaggtggcgcccaccatgcccagctagtttttatatttttagtagagatagggtttcaatgtgttggccaggatggtcctgaactcctgacctcagatgatctgcccaccttggcctcccaaagtgctgggattacaggtgggagccacagcattggcctgatttctgcacttatttttattgcttcttttcttcagcttactttggatgtagttaaaaaaaaaaaaaaactttagagatagggtcttggtctgttgccctggctgtctcaaactcctggcctcaagcaatcctcctcagcctaccaaagtgctgggattatatgtgacagccaataaaaattatggctaaaaaatggtaaaatttttttttctttttttttgagacagagtcttgctctgtcaccctggctggagtgcagtggcacgatcttggctcactgcaacctctgcctccctggttcaagcgattctcctgcctcagcctcccaagcagctgagactacaggtgtgcgccaccatgcctaatttttttgcatttttaatggaaatgggattaccggcatgagccaccatgcctggcctaaaaattatttttacaatttaaaaatatttaagaaatttgagggaggcaagtagagagaggctgccaacttttcaggtttccaaagaacattaaaaaacaactagcattctgccaggtgtggtggctcacgctgcactttgggagaccaagagggggtgcatcatctgaggtcaggagtttcagacccagcctgaccaatatggtgaaaccccatctctactaaaaatacaaaaattagctggtatggtggcaggcgcttgtagtcccagctacttgggaggctgagataggagaaatgcttgaacctgggaagtggaggttgttgcaatgagcctagatcgtgccactgcactccagcctgggcaacagagtaagactgtctcaacaaaaacaaaacagaacaaaaacccaacgactagcttttagtctcttattcatcatcatttcataacaaaagcgaagtttaacccagaaaaaggacaagtcacagaatgagagacagtttttagagtgtattaagttttcttttatgaaaaccttacttcagggtcatttttttccctcatttcactacagagtgatttttaaaaacaatctttgccccagagagcagcacatgcattgatttttgggaaccatgaaattacagatggaaaaactgagaggaaagtgaccttcccaaggtcacagagggactggtgagtcacagaactcagacatgcaaaagagccaagagcttatcatcttaatcacctccaccccaacctctatacagaaccagggccccctcctctagccccacctctatacagaaacacgcccctccacccacccctacctctagaataaaccacgcccctccccacccccacctctacactgaaccacgccccttcacccacccatacttctacactgaaccacgtccccttcccccacccccacctctacacggaaccaggccccttcccccactcccacctccacactgaaccacgctctttccccactcctaactctacactgaaccacgccctttctcccactcctacctctatacagaaccacgcccttctgccactcaaaactctacactgacccacaccccttcccccactcctacctctacactgagccacgcccttgtccccactcataactctacactgaaccacaccccttccccgactcccacctctatccagaaccacgcccttcccccactcccacctctatccagaaccacgccctttccccactcctacctctatacagaaccacaccccttcccccactcccacctctacaatgaaccacgccctttcccccactcccacctctatccagaaccacgccctttcccccactcctacctccatacagaaccacacctcttctcctactcctacctctacactgaatcacgccccttcccccactcctacctctatactgaaacaagccctcttccccaaccccctcctctacactgaaccacgcccccttccgtcaccacctctgtactgaaccacgcccccttccatcacccccacctctgtactgaaccacgcccccttctgtcacccccacctctgtgctgaaccacgcccccttcactacccccatctcgggaggatctttacctggctgttgatgttattgttttctccaaacaccaggatacccccgaggaaggccgccaggaatgcgtgtgctgggtaggtcttgccttgtatgtaggactgcagggcacggagacccttgtaggtgaacacaaaccgtgccaggttccaggagtggatatatgtggcctgcagtatggcccacagcttctcctggaggctgcacaaacacaggtgcccctgccatgagtgcaggctcagcagccccaaagggcttttacgcactgggcatgcctaacaaccagccaaggagctcggagtaatgctcattcagtcaccggcctctacccttcatgttctctcccttgattcaggccttgactcagtgccacctccccaaggagaccctccctgatcaccctacagaacagaatacccatcacatcctgtcctgaccctaattttcttttccttcctagctatggtcaccaaccgacatttatgtgcttgtttattatcttccctcaccccagtagcagctataggagggtggtgtctggatctggcttgttcatctgcagggcttggcacgtagtaggtgcttaataaatgtttttttgagtaaacatgtgaaggagtgagtgtctgccatgtgctggatgtgggggtacgattctgagaagaaacagatctgctcgccaccctcaggggcttatgatctactgggagaggaaaatgttaaataaataatcacaaaaagaactttgaccttgacaagagatggcgctgggatcttcccgatgaggaggtcaagaggggaggagagccacatcccaggcagagggctcagcacgtgccacgcccggaggagggtcagggagtatgaggaaaggagcagagagaagccaccgtggccatgggcagagaaccagagagtttgtggggagggtgcagggcaaagacagtggggccatgctgagtttggtctttatcctgagaagtgaacatttagatagaggaggctattctttttatctcttaaaaatcactagaggccaggtgcagtggctcacacctataaccccaacactttgggaggctgagctgagatggtgccactgcattccagcctggacgacagagactctaccttaaaaaaagaaaaaattactaggaggccagacacagtggctcacacctgtcatcccagcacttcgagaggtcaacacgggcagatcccttgagcccaggagttccagaccagcctgggcaacataatgagacctcgtctctataaaaaatagaaaaaattagccaggtgtggtggcacacgcgtgtagttcctgctacttgggaggctgaaggaggaggtttgcttgagtctgcagtgaactgtgattgtgccacagcactccagtctgggtgacagagaccctgtctctaaaaattaaaaaaaaaaaaaaaaatcactagggggcaggaaggataacacagagaaggagcagagtctactcctcccaattcaggaatggcaaactcaggtgctcttaaggctagacgaagaccctaaatgagtgagagggtccacggggaaatcttccaggtgactggggacagccgggagcagatggctctcaccccgcgcaaacacaggccccagtgttgccagttctaaggcaggaaagctggatttccatgtggaatctaccagtttttaaatgttggcactaaccctgccttcaaaatgtgtctagagactgaccactcttctcacctgcaccagcaccactgaggtccaagcccgacatttgctcacttgcatcactgccacagcctcttggagggaacctgcttctgcccttgggtggccctgctcccctccccccacaccaatctgttcttaacctggcagcaattttttttttttttcctctgagatggagtctagctctgttgcccaggctggagtccagtggcatgatctgggctcactgcaacctcttcctcctgggtttgagcgattctcctgcctcagcctcccgagtagctgggactacaggtgtgcaacatcacatccgactaatctttgtttgttcatttatttatttattttgagacggagtctcactctgtgtggcccaggctggagcgcagtagcgcaatctcggctcactgcaatctccgcctctcaggttcaagcaattctcctgcctcagcctcccgagtagctgggaccacaggtgtgcgccgccaagcccagctaatttttgtatttttagtagagacggggtttcaccatgttggccaggatggtcttgatctcctgacctcgtgatctgcctgcctcggcttcccaaagtgctgggattacaggcatgagccactgtgcccaacctaatctttgtatttttcagtagagacagggttttgccatgttggccagactggtctcgaactcctgacctcaagtgtaccacctcggcctcccaaaatgttgggattataggcgtgagccactgcgcctggcctagcagcaaattcttaactctcacgctgttaacacataagtcaaataatggtgcagccctgctcaaaatcttacaacaatttcccattgcacttaaaggaaaagccaaattcctctctatgacccaaagctggaaaggaccaacccaggtcaagctgtgacccgcctctctgtcctctctccccttcagcccctctgctccagcctcctcacacttatcaagcaggatcctatctcaaggtctttgcactggctatgcccgtggcctggaacactcactctttcccctcatatccacctggacaactctgtctccttcaagtctttactccaatgtcactttctcatagcggccttccctatttaattctgcaacctgtcccctcagcacttctgatgccctttccctttttccctgctctaattttgcttttccataaccatagcaccttctaacataccacagactctccttactatgtttattttctgccaccccctgctagaatgtcagcaggagtcactgtccgttttgttcactgctgtatccccagtacctagaacagtgtctggcacatagcagatgctcaataaatatctgctgaatgaacacatgagttcagtttttcaaaaaatgacttggaggacaacaaaaacaaaatagaaaaaaataaataagataaaaatacaaaatgagcacatcttgcaagttggatttggcctggaggctgccagtgcatgattcctgtatgttccacatgagcctatatgcattaaacactagaccgcaacccgttttctgagaagtgccttgagggaagagctacgggagatgacaggaaggtgaagatgcttcagcgagagacaagagatcagggagctttgaggaggaagtgatcctcagagaactggtctggattgccaggagggaagtaaaggtggagtgcgagccaaaggcactcctggcgggggtgctgcgtgagcagatgtgtgcaggtggagctatacacatggcatgtgcatggaatggcagcgagttctgtgtgccaagggcacgccagggtggacacaacgggggtcagctgaggccagactgcagaaggccctgaaggccaggcctggaagctgggcttccttggagggcacagggagttttcaagcagggataatgggatcagagttggactttagggccgggcacggtgactcacacctgtaatctcagcactgtggaaggcccctgaagtcaggagttcaagaccagcctggccaatatggtaaaactccatctctactaaaaatacaaaaattagccaggtgtggtggtgggtgcctatagtcccagctactcaggagactgaagcaggagaatcgcttgaaccccagaggcggaggttgcagtgaaccgagatcatcaccgcactctgacctgggtgacagagagagactccatctcaacaacaacaacaacaacaacaacaaaacacaacaaaaaaagagttgaactttagaaggcgtgatggggggacagggtagacccagctaagaagctattacgactgtcctggcactgagggctgaccacattctctcccagtttgagggatgtgtacctgccattccggaagagaaaggtcatgaccagcgcgtgaggggcccggattttggctccatagctgtagaaacagaagaaaacagttactataatgtcactgtgtcgcactttctttttgggctgtccttttgaccccttgttctctccccccatcccaaattctaacaccactttgggaggggaaatcatgctggatgcaaatcctggctctgatacttcctggtagtatggtctcaggcgcgtcctttaacttctctcagactcagtttccgcaccataaaaagggatgtttatttttaattatttagcgacagagcctcactttgtctcccaggctggtgtgcagtggtacgatcatagctcactgcagccctgaactcctggaatccagcgatcctccagcctcacctccctgagtagctgagactacaggtgtgtgccatcacgctcagcataaaaagggatgttttttgtttgttttttgagatggagtctcactctgtcgcccaggctggagtacagtggtgcaatcttggctcactgcagcctcggcctcccgggttcaagcaattctcctgtctcagcctcccaagtagctgggattacaggcgccagccaccatgccaggctaatttttgtatttttagtagagatggagtttcaccatgttgcccaggctggtctggaactcctgatctcaggtgatccactcacctcaaaaagggatgttaaacttcagagggctggttgtaatttttttcttttctgagacagagtctctctctgtagcccaggcttggagtgcagtggtatgatcttagcttactgcaacctccacctcctgggttcaagcaattctcctggttcagcctcccaagtagctgggattacaggcacgtgccaccatgcctggctaatttttgtatttttagtatgagataaggtttctccatgttggccaggctggtctcaaactcctgagctcaggtgatctgcccgccttggcctcctaaagtgctgggattacaggcgtgagccactgtgccccgccccataattttgatggaaggagatggtacatgtaaaaggtccaccatccttgctcaactggctttgtggaattgctccctctgctccatcctgacgttctcactgcagccagtctcttttttttttttttttttttgagacgaagttttgttcttgttgcccagcctggagtgcaatggcatgatctcggctcactgcaacctccgcctcctgggttcaagcgattctcctgcctcagcctcccgagtagctgggattacaggcatgtgccaccatgcctggctaactttgtatttttagtagagacgaggtttctccctgttggtcaggctggtctcgaactcccgacctcaggtgatccgcccacctcggcctcccaaagtgctgggattacaggcgtgagccatcctgcctgtcctagccagtctcatcttttaaaaacatcaatctcatcacatcactcccagcttaaaatcctctaacacctttccactactcacagaacaaattccaagctcttccctgcagccttgaaagtgctatagccttggcccctgctcactgctcctacctcaccccagggccctcctctgctgctccagccacactgtccttcctggactgcatctgacacatcaggttcttctctgctcctggctttggcctggcagttcctactacctggcgtgctcctccccagccaccttccctcagccttccggtctcagctgggccctctgcaaaggcctcctgatgctccagcctaggtttgagcaatttttcattgccacagatcccaaaacttctctccagcacttcatcttcccaatttaatgactcggttattcagtatttattctattataatgatctctttcctgtgctagactgtgggctctgtgaagacagggaatgtgtctggcttgtcatctgcatagtccctagcatagtaccccacatggtacctgacatataacatgtgcttgataaataactgttgactgaccgatgccagaacaccccttacccatgacaatgtcatttctagaaggttctgtcttcagcttagctcatcttaaagttaacagattccctaaaacagctgttaggtaacactgtacctattcaaaatgtacctctttctaactattatacaaagaaggacctcaactttgtaaaaatgcatttataaaaaggctggcactttgggaagctgaagtgggcagatcatttgaggtcaggagtttgagaccaacctggacaacatggtgaaaccctgtctctactaaaaatactacaaaaattagctgggtgtggtggcaggcacctgtaatcccagctactcgggaggctgaggcaggagaatctcttgaacccaggaggcagaggctgcagcgagttaagatcgtgccactgtactccagcctgggcagcagactaagactctgtctcaaaaacaaaaataaaataaaataaaaaactggaaggaaatatgccactgttattagcaatgcccactgcactggaggaatatataatagatataatttatttttgcttgctttttaaacttttctagacttccagaattatctatgattaagtactgcttttaaaattattaaatattttaggccgggcgcggtggctcacgcctgtaatcccagcactttgggaggccgaggcgggcggatcacgaggtcaggagattgagaccatcccggctaaaacggtgaaaccccgtctctactaaaaatacaaaaaattagccgggcgtagtggcgggcgcctgtagtcccagctacttgggaggctgaggcaggagaatggcgtgaacccgggaggcggagcttgcagtgagccgagatcgcgccactgcactccagcctgggcgacagagcgagactccgtctcaaaaaaaaaaaaaaaaaaattattaaatattttaaatgttacataattgttacataattgcctctttttaagattcaaacctcttcccccacccttcctttcccctcctcatttagggatctaggaatgacgtgaacaagaccatgtttactttcattgttttaactatactcagatgaatagtagaaagacagtggtatttgggccaaagccctgccatgttttgctatgtgagcttggataaattagttaacctctctgaacctcccttttcccatcaacaaaaggtattctccattttacagaatggcttttggcagttacgcacatataaaagttcctaggtcaatcaatattagtgtctcttcttttcttactcttctttattggacacctccacccctacccctatccctaagttctccaggtacccaaccctggtcttaccaggctacaaggtctaaaaatcctgacagcctccttgagacaatggtcatgagccacatactattgtctccccaaatatacatgaatgttcactgcaggcttgtttgaaaaaacaaaagactggaatcaaacctgtgtccaaggctgggtgtggtggctcacgcctgtaatcccagcacaatgggaggccgagacaggccgatcacgaggtcaggagatcgagcccatcctggctaacacggtgaaaccctgtctctactaaaaatacaaaaaaattagccgggcgtggtggtgggtgcctgtagtcccagctactcaggaggctgaggcaggagaatggtgtgaacctgggagacggagcttgcagtgagccgagattgcgccactgcactccagcctgggcaacagagcgacactccatctcaaaaaaaaaaaaaaaaaaaaaaaaaaaaaacttggcaaaagggttactgatgttatctcagggcacatcaaggatatgcccttggccagacccagtgggaaccagttctacctgactcttgagtgtccatgggagccaagagcctggcactggtgccaggcatccttgggtttgaatcccggctccaaccgtgaccaagtgctgtggccacgagcaatgggtctacctctgagctacagccttttcatctggaaaatggggacaatggcaattctgatcttgcacacttattcattcattcaataaatatttcagaaactactaaataccaggtgctagtaatacaccaaggaacaaaatagataaagttatggcctcatgaaactttcttttttttccttttgagatggagtttcactctgtcacccaggctggagtgcagtggcacaatctcagctcactgcaacctccacctcctgggttcaagcggttctcctgcctcagcctcccatgtagccgggactacaggcatgtgacactacacccggctaatttttgtatttttggtagaaacggggttttgccatgttggccaggctagtctcgaactcctgacctcagataatccgcctgcctcggcctcccaaagtgctaggattacaggtgtgagccaccgtggccagcctgtgctaagcatttcacacatattgactcaatcctgatagtataagtactagtaccatgcccattttacagatattgaggcttagagaggctaaatgacttcctccagatcacacgggtaggtggggccagggttcaagccaaggcatccacatccttcccaccatcccacgttgccactaggatgccaattctgggggacacaaaccactttctctggtttgttctctgctttgtccccggttctggcactgtaggccctcaataaatggtggctgttatgcactaggtttaaaggagactgagctcccctctaggcaccagccagggcaatgaccccaagacctctcttgcaggtaagatgccaggatagttgcagcttcttttacattcattgtcacgtcccaggagccccctgagccgaacgggacttagcgctggagtcctacaggtgagaagtgagaagcaggatgcaagcccatgggcaagcttcatggggacagaatagacaggaggcatccgcctgccagctagaggccagagtccagttccccattgtgcagatggggccgttgaggcccaaaggcacacagagaggtgaggtgaactgaacccaaatgaggggatacagaagctggcatgggaggagtcaaagcaagagggccaggctgcaaaggttggaagacccagaaaatgtgcagtgggagccccagttcagagctgggaaggcgcgcaagccaaaatccagctcccattgcacagatggtgacctccgagacttagagacacacgaggactgctccagggcaaacagcaccgcggcatcggacttcgaactcgcgcctctgaccccaggcaggacatccctcagccccagcccggcccgacggccccactcacacagccccgttccggaagcccttaagcacggccaacgcagcgtggtagcggcgcttgcgcagcagtgcgttgacgactacgagcagagcccttagctgcggcggggctgccatagtgcgggctgcgcgcagggtcggggttaggaactgtaagcgcactgacagccggaggttccagctgcgcgcccacagcccctcggtagcgccgccgactcgtggcgtctataggctgtttctgcgtcactcatgcatggaagaccaatcagagagcgtacttgtctcatgggacaatagcactcatcgaaatagttgtctgactggaagagaaaggaaagcttgtagccaatcacagtgggctccgcccaaggtcacacacgatttgtccaatcagaaggcactttcccttgggccatgttgggttcacgagtgggtttggaaggaggcgtgtacttggaaggagggctcctgaatgaggagtggccctgcttagagatgggatgggcgacaggtgatgatacagggaggagcagggccccatctttatgcgagatagttctgactgggatatcctttaccatagcgatcttcccagagtgtcagtcacatggcccctcaatggcttccatgtacgtatgtatgttttgagatgcagcctcgctctgtcacccaggctggagtgcagtggcgcgatctcggctcactgcaacctccaccccccagggttcaagcagttctcctgcctcagcctcctgagtagctgggactacaggcacccaccaccatgcctggcaaatttttttgtatttttagtagagacggggtttcaccatgttggccaggctgctctcctgacctcaggtgatccacctgcctcggccttccaaagtgctgggattacaggcgtgaacccagccggcgtccacttattcttagaatccaaactcctccccaaggcccaagagagaagacctcctgtgatctggtccgtgcctctccctctgaccccacgttccagcacttgccacctcactgcttcccagccaaacagcctcctttctgttccttgggccaagaacccttctacctcagggcctttgcacttgctggttccctgcttgatattcgccatcctgggctcttcccatgatgggcttcttctcatccttcaggtttcagctcaaatgccacttcatcagagagactttctgagacatccaatttgaagtagcactgtccactctgactcattaccctggctcttttttttttttttttttttttagactgagtctcggatctatcacccaggctggagcgcagtagtgtgatctcagctcacttcaacttctgcctcccaggttcaagggattcttctgcctcagcctcctgaggagctaggactacaggtgcatgccaccacgcccggctaatttttgtatttttagtaaagacggggtttcaccatattggccaggctagtccaaactcccgaccttgtgatccgcccgcctcggcctcccaaagtgctggaattacaaatgtgagccatcgtgcccggccaccctggttcttatgtgttttttttttttatagaacttttgacactttagacttgtttactatgtgttcattgtccattgcccttatcaaactgtaaattctatgaaggaagaaatcttatttgtcttgttttctgctgtaaccccaacactaggcacatggtgggtactcaacacttgcttgtttaagcaacacatagttttgggttgtcatctctgagagcattgatgggtgacattaacatatgatgtcactatgtggagttgtcactgaataacagctacacactgagtggtggctgtgacttgtgagggtgtcccctggtacttgggccatatggtatttaccagtgatgttatttgctcagtgtcaggggacaatttcagaggtcaatgaaggagggagttgtgctgggcctattttgtcactgaaactgggttgtccgggatttttcttttgtgatggtaggctactttattcagttcatccttcctctgaagataatgactatgttagataatatattaaaatatcctcttaaaaacactgaagttccttggctgggcacagtggctcatgcctgtaatcccagcactttgggaagccgaggcgggcggatcacttgaagccaggagttcgagaccacccctgaccaacatggtgaaaccccgtctctaaaaaattaaaaaacaaaaacaaaaacaaaaaaacactgaagctctgccaggtgcggtaggtagctcacgcctgtaatcccggcactttgggaagccaaggtgggtggatctcttgagcccaggagttcaagaccagcctgggcaacatggcgaaaacccatctctactaaaaatacaaaaattagccaggcctggtggcacacacctgtagtcccaactacaggtgcgggaggatcacctgagcctggagaggtcaacactgcggtgagcggtgatcacgccactggactccagcctgggtgactgagaccctgtgtcaaactgaagtgcttaaaagtatgaggaatgtggccgggcacggtggctcacgcctttaatcccagcactttgggagggtgaggtgggtgggtcacctggggtcggagttcgagacgagcctgaccaacacagagaaatcctgtctctactaaaaatacaaaattagccgggcgtggtggcacgtgcctgtaatcccagctactcaggaggctgaagcaggagaatcgcttgaacccgggaggcagaggttgcagtaagctgagatcgcgccgctgcactccagcctgggcaaccagagcgaaagtccatcttttttttttttttttttgagacggagtctcgctctgtcgcccaagctggaatgcagtggtgcgatcttggctcactgcaagctccacctcccgggttcacgccattctcctgcctcagcctcccgagcagctgggactacaggtgcccaccaccacgctgggctaattttttgtatttttagtagagatggggtttcatcatgttagccaggatggtctcgatctcctgacctcgtgatccgcccgcctccgcctcccaaagtgctgggattataggcgtgagccaccgcgcccggcccgaaagtccatcttaaaaaaaaaaaaaaaagtatgaggaatgctcaggccaattatggagtgaaagctggtaaccagatgcttaacgggaagattgggatattggagcaccaaggctacttatgacatgagggcgtttaccaatattaaacctgcaagtttcagcttgtcaaccacacagggcaagagggacacaagtgaaaatctagggcctccccaggtggggagccatatagcagatctcctcacattaagctgagccccaaagggtgttgccctcaagtctaatgtgaaatgaatccactgcacaacccacaccaccagcccctaggaactacagaaaaggctgccttggtgctaagcagaacagctgaaggagaaggaaagaggaattttttttttaaagctcttccttaggaagttgtgatcattgatgagtttttttgtaccccagggagtagagcctgatataatagatcaagaaagctcaagctatgaactgggaacctggtttgagatgataaccgagtagatgtgctctccaaacccttggcaaaaaggaaatacaggccgggcacagtggctcgcgcctgtaatcccagcactttgggaggctgaggcaggtggatcacctgaggtcgggagttcgagaccagcttggccaacatggtgaaacctcatctctactaaaaatacaaaaattagctgggcatggtggtgcgcgcctgtagtcccagtcacacaggaggctgaggcaggagaatcgcttgaacccgggaggcagaggttgcagtgagccgagatcatgccactgcactccagcctgccaacagagcaagacttcgtctcaaaaagaaaaaaaagaagaaaaaaaaaagcaaaaattagcccagcatggtggcaggcacctgtagtcccagctactcgggaggctgaggcatgagaatcacttgaactcagaagacgaagggtgcagtgagccaagatggcaccactgcactccagcgtgggcgacagagcaagactccatctcaaaaaaaaaaaaaattgtgctcacgaaatttaaaacttaaaaaaatcaatattgggagcaaaaaactatttatttcatggcagatttgaaaaggaaccaaacagaatttctagaaatctacttctactgctcccatgaggagtcagtcacaaagtcctgacatacggcccggcatcagaaggtgtttcgaaactatttggtttggcaagttcttcctgggtgctctcttttgctaagtactttctcacatagttgaataagtttctgccctcaaggggccctgcagggtgctaaggatagagttgcaataatggggacgcttattatctggtgacctttttaattttacgtaactctgagttcctcagtgcagggcctgtttgttcacctttgcccagtaagcacttacagagagtacagtactgagtactgcctgtgggccagggattgtttcctgagtgctttcttttctttctttctttctttttttttttttctttgagacacagtcttgctctgtcacgcaggctggagtgcagtgtggcgtgatcttggctcactgcaacctccgcctcccaggttcaagccattctgctgcctcagcctcctgagtagctgcgattacaggcacccaccaccacgcccagctaatttttgtatttttagtagaaatgaggtttcaccatgttgatcaggccggtcttgaactcctgacctcaagtgatcctcccgcctggacctcctaaagtcaccgcgcctggccctaacctttttttttttttgagacaagagtcttgctctgttgcgcccaggctggagtgcagtggcgcaatctcggctcaccgcaacctctgcctctcaggttcaagtgattctcctgcctcagcctccctagtagctgggattacaggtgcccgtcaccatgtccagctaattttttttttttgtatttttagtagagatagggtttcactgtgttggcctggctggtcttgaactcctgaccttgccaaactccaaggcccacctcagcctctcaaagtgctgggattacaagcctgagccactgtgcctggccggacctcgtttaaccttaattagctctttatttatttatttatttatttattatttgagacagaatcttgctctgtcacccaggctggactgcagtggcgcatctgcctcccgggttcaagtgattctcttgcctcaacctcccgagtaactgcgattacaggtgcgcgccaccatgcccagctaatttttgtacttttagtagaaacagggtttcaccatgttggccaggctggtcttgaactcccgacctcagctaatccacccacctcagcctcccaaagtgctgggattacaagcatgagccatcgcacccggccccttaattagctctttaaagactcaggttacagttacattctgaggtactaggggctaggacatcaacgtatgaattttgtggggaagacacaattcaatccataacagccacatgctttgctgcttactaccaacaccaaccaacctaacaagatgtcaggacccagcattgccttgtgtgtcagcacattcttccccttgtagctgggagtctgatttaagcatgagattcttccctccccacagagaagttaatttttctggggtggctggagcactcactgtggagtgggacactggacgtttcccactctccctcctccctgcttgaccccttgcctggaattattacattacctaccccaggagtctctaagctgtgattggattctgttcggtgccaaccaggtagccccaagggaactggacatgtgactgataagtgtttggtggatgaagagatgccagtaaggggtggaaagtttggagtgggggcagcctgactggggagcctgccagaggtggggctctacctccctgaaactcattcagttccatcggtcaagccttcagtgaagcatttcccaagttgcctctgtgccaagccctggggtccaatttgtgtgtgtgggggtggtggtggggttcttttttgagatgaagtcttgctctgtagcccagatctcagctacaggtagctgagacaacaggtatactacaggcatatgtggctcatatctcagcttgctgcaacctctgcctcttgggttcaagcgattctcctgccccagcctcccaagtagctgggattacaggcatgcgccatcatgcctggctaatttttgtatttttagtagagacacagtttgagacaagagtcttgtctggtcttgaactcctgacctcaggtgatctgcccacctgggcctcccaaagtgctgggattacaggtgtgagccatggcgcatggccaagctcctattgttgcaggcgtttcagcaggagagaacagcatatgcaatatgcatctatgcaacagcatagatgaaaatctactctgcatatgcacctggtggtatggaaatatatgggaagctggccaggcacagtggctcacatctgtaatcccagcactttgggaggccgaagtgggtggatcacgaggtcagatcgagaccattctggctcacacagtgaaaccccgtctctactgaaaatacaaatacccatacatcacttattactctcagctgcccctttacagttcttggcctcttttcattttggcctcagggcctttgcacttgttggtctctctgcctttctcttctcttttcacattgctgactccagcttatttctcaggcccacttcctcagacagactccccctgaccattctgtctaaaagtagcttcccctctttctggaaaaaaagtatttaaagtcatagaaaatttctctctttctctttttttttccccttgtttacagcccatctcacctagctagactaagactccatgaaggcaaggatttttgtcttttggttcatgcctgcatccgcagcatctagaatggtgtctagcacacagtaggtgctcaacaaatattttgaaagtaatcaaataaatgtgaacatattcatttcttatttgaataataaaactaaaacaggccgggcgtggtggctcacgcctataatcccagcactttgggaagctgaagcaggcaattgcctgagctcaggagttcgaggccagcctggccaacatggtgaaacactgtctctgcaaaaaatacaaaaattagctgggcatggtggcaggcacctgtagtctaagatacttgagaggctgaggcacgagaatctcttgaacccgggaggtggaggttgcagtgagcagagattggccactgcattccagcctgggcaacacaacatgactctgtctcaaaaaacaaaaaataataaataaataaataaaacaaaaacaataggtatactttgcaggctttggtgatgcagacaaacaaagaatagttatatggagaaacttgcaggggagaggggagaatctgaggccattggatcagtgagcatgttagagacagggaggaaggaaccctgactttaccctgccagcaaggcaatggaagggggcgctcacagcttggggtgtgcccttcaagattcccaggaaggtaggtggggtgtggtgtcttggagaagagtggatttcctcttttttctttttctcctttttgtggagaatggggtctcactgtgttgccccagctggtcttgaactcctaggctcaagcgatcctccagcctctgcctccctaaatgctgggatgacaggcttgagccactgcccctggcaggttgggttttctgtggggaacatttgctcagggctcactgtgcaggggggaatgggaagggaaatggaggtaagggggtagcagtggtgtgcacaggggtggtgttcagggaagtacaaggagttcaccggcagaaatgggccttgagggggtaaataggcagagagtctgtgaggctattctgtgaaagggccatatatacaaagtggtccccaaatgccaacggagccaaaaaaccaaggaatgaggcagacaaattcagtttgtcagtaaagggtgttttaatgggggatcttaaaagcagcatgggcttgggcggcagcaagacaggagatctctccctctgttaccccaagacttaggccttatattccacagggaaagagttttaagtgctctctgcaagacaattaaaggaaacttccagagcagacaagaatgctgtatgtttcatagcttataatttatgcaataacatcagggcggcatatagcttataatttgtgcaataacatcaggctgactagggacagtaaataaagtaggaatcaggaggcattcacgggactggggctaatcagaagtcaacatgggggattagcatccaagatggagtcacttttgtctccacagagacaacttgtcaggaacagtggctagcagggttccccaaggggagaggaactttgaaaaaacaattttaaaaaattgtagttcacaggtctcaaactcctgggctcatgcagtcctcctgccttggcctctcaaagtgctaggcttagagcagtgcgccaccatgcccagctgcaaacaaataatttttaattgtaggagttatatagtgaatacaagaaaatgaaaattatgatatttgttatttatttagctgaggctaaaataggtattttagtaaaaccaatgagaacatttagagtccaatccatggttgtcccgttgtatgacgatgtggccatgatcatgggagagattcatgattgatggtgacaaagattctttgcttgctgtaactgcttggtcagactttggaatcttctgctaggcccacctgtgcacttctttgtaaaatctagttttcacaaagaatgctttaagtcagtttagcaggaacccccatccttaatatttaatcatcctagatatctgatcaggttcctcatctgtcaccatctcctaggtgatgttgattaccctagcccatcttcagcaagaatcctgttaggtcggtttagccagaattccccttacctccgatgtttcctcttggtaattttctatcaactgacctccctacccccagcccccatgatgttcctcggctataaattcccacttgcctatgctgtattcagagttgagcccagtctctctcccccactgcaaggcccctttgtagtggtacctatcgcagtagttctgaataaagccttccttattgtgtttgtgttttagcaaagatcattgaacaattttttttctttttttttttttttttttgagacagggtctcattctgtcacccgggctggcatgcagtgacatgatcatggctcactgcagctttgacttctctggctcaagaaatcctctcacctcagcatccctacctagtagctgggattataggtatgtgccacatacctggctaatatttttaaaaatcatttgtggagatgctggtctgactatgttacctgggctggtctccaatttctgggctcaagcaatcctcccgccacctcagcctcccaaagtgctgggattacagaggagccaccacacccaggtaaataattttttctttttctttttttttttaaatttgagatggagttttgcttttgttgtccaggctggagtgcagtggcgtgatctcggctcaccgcaaccttcgcctcccgggttcaagcaattatcctgcctcagcctcccgagtagctgggattataggcatgtgccaccatggccacctaattttatttatttattgtttttaagtagagacggggtttctccatgttggtcaggctggtctcaaactcccgacttcaggtgatctgcccaccttggcctcccaaagtgctgggattacaggcgtgagccactgtgcccggcctaattttttctttaacaatagccccttccttagtttccccctcccctctatgcactccctaaactcttgcttgtttcccaagggtactttgaaaccactatcacacattgattattgagaaagggtctcactctgttgcctaggcttgagtgcagtggtgagatcatagcccactgcagcctctacttcctaggcttaagcaattctcctgcctcagcctcctgagtagctggtactcaagtgcaaaccaccatgcccagctacttttgttgttgttgttgagacggggtctcactatgttgctcagacaggtctcaaactcctggatacaaatgatcctccagcctcagcctcccaaagtgctgggattacaggtgtgaaccactgtggccggcatacacattgtaattaaataacctttaagatttaatgtcggtctttttttttttttttgagacagagtcttgctctgtcgctaggctggagtctgtggcacgatctcggctcactgcaacctctgactccctggttcaagcaattctcctgcctcagcctcccaagtaactgggattacaggcacgtgccaccatgcccagataatttttatatttttagtagagacggggtttcactaggttggccaggatggtctcgaactcctgacctcgtgatccgcctgcctcggcctcccaaagtgctgggattacaggcatgagccgccgcgcctggcctaatgtcggtctttcttcccacctctaactccatgggaaaggaccaccatgtctctagagctattacgggacttggtgcatagcaggccgttaataagcagttgatggaggatgaatgaagatgagaggggtctgtgtgtgtaggggaagtcccagtgaggagcacctctcattctgtgagacctggataggacccctcggaggctgggctaggagtggctggggtgggtgttgggggtttatgtgacagaaatggggtcccaacaagcagggatggagggtgaagagatggagttacttaagagataatgggatccccagcacggagacccacgcctgtaatcccagtgctttgggaggccgagacgtgaggatcgctggaggccagaagttgacaccagcctggacaaaatagtgagaccctgatctctacaaaaaaataaaaataaaaattagtaggacatggtggcgtgtgccggtagtccccgctactctggaggctgaggcgggctcccaacaggcagagttgagcagggtagtaggggcgggaagtctctaataggggatgagggatgggaatctatgttgtacagcctggagatccctgtgacagttgggtggtctgggtgagatgggataggggtcatggtttgttgcagagtcggggtatactgtgctcagcggaaatggggtccgtgcagcagacctggaggactcacgtgctgtgggaatgggggattctgtgtcagagctggggggtcgggtccggtgagatggggatgcggatttagataatagggatgggaagttccgcgtgtgcggcggatataaggtcggtgtagacttggtcgttcaagtgaggcggggtccacactcggtggcccggtgactgggttatcgagtggagccagggcagcccagagatgctggggtcccgcgagcctaggttgggtttccagggctgggggctcggcggcggctcctgggcgccccctggcggccccgactcaaccgccacggctcccacaatgctcgcgtagccgggcttcggttcctgtggcggcgacggcggcggctccaagatggcgcaggcgatctttgaggccctggagggtgagcggcggcggggccggcggaggcggctgttccgcgctgcgccccctcccgccgcgccctcgcagcgcccggcctagggcgcgcagcggccgcggggcggagggcgccggggctggaacagccgcggggcgggaggggcgcgggcgggaacagcgcgggagccgaggcccggcgggggagctccggggccggaacagccggggagagccaggccggcggggagggggctcgggtccggaacagcgccagcctgggcggccttgggcgggcgcgggaggggctccctgcagggaactgcgcgggaggcgacggcggggcggtctggaacagccgcggccagggaggcggcttggcggcgcgcggggcccgggacgggggtgcggtcgcagctgcgggcaggagggcctcggcggcctgaccacgaagaacttctgcggagcggactgtatgcctcgtgctaggacgtagtctcaaaatcagaccacagcagcagaggcgccacctgtgtgcacagcctggactcagagcttagggacccaagccagcaaacacctggcgcctgcagtgcgcaccgtggccggtgcagttttacaaattaaactgacaccgtgggtgctggcgcggtgtgcccggccgggacgcggtgttcccagacccaggccagcaaacgctgggtgccgacagactgttccgtgctctgcaagaacctgggatggggttggtgctcaggctcaaaactgtgggctttggagacagcaaacactgagcacctccatgtgtgcatctgctgggcgtcggggaggaagggcagccttagcgactcggggccatggcgcagaatagatattgtgggaaatacagaccaagaatggtcttggaggagtgggatgagatgagtatacagatagggtgcaaactcgaagtactggactggcgggatgaagctgaagctttgagtcctgcagcttcctaggagatctcagccactccctgcactttttaattttttgagacggagtctcactctgtcgcccaggctggagtgcagtggcgcgatctcggctcactgcaacctccccctcccaggtttgagcgattctcgtgcctccgcctcctgagtagctgggactataggcgtgcaccaccacacccggctaatttccttttttttttttttttttgagacagagtcttgctctgttgcccaggctggagtgcagtggagcgatctcggctcactgcaacctccgcttcccggggttcacgccattcttctgcttcttctgcctcagcctcgagagcagctgagactacaggcatccgccaccacgcccggctaatttttttttttttttgtattttaagtagagacggggtttcaccgtgttagcgagcatggactcgatctcgtgacctcgtgatccgcccgccttggcctcccaaagtgctgggattacaggcgtgagccaccgcgcccggccatttttttgtatttttaatagagacggagtttcaccatgttggccagattggtcttgaactcctggcctcaagtgatctgcccgcctcagcctcccaaagtgctgggattacaggcgtgagcgactgctccaggactcccttcacttcttgaaggatcacaattcgcaccaggaaatggggggcggggtagccctgtctccatctagtggggttccgattcaaagactgactgagacagacactccctgtagtttctgccctgcagtctggtagaggagagaaattataaaacaagcaattatagaaattatagaattatggaaaaggtcatgtagaataagatgacctcagctggccattcctactgtgaataacataagcaggaggtggtggatcaggaaggccgaggtcagtggtagttccctcccagaggccaatagaatggggtgaggcttactttctctttaggctgtttggacttcctcattgtttgaatatttactgcaagaatgtgtttgtgtattgagtaatgaagacagttaaagagaaatcagttcctaggacagtgggatgcatgttgggtgaagaaagggcagcaggactgtggagatctaggggaggagggcaggagaatggcccaggcagcaggaactgcattttcaaagccctggggagaaaggtctcctgggattcacagaagctgggtgtgggtgaactgctagagatggggtttgatggagcagctaaactttatcttgggatcagtgtggagctaacaaaaggttttcagcaggggagcagcacaatgtgatgtatgttttataaagttcaccctagctgctctggaacagactggagggggccagagtggcagtggggggtcggggtggaggctgctgaggttgtacagcagagaactgggctggtaaacaactgtggggatggaaagacagtttatttgagatgtattggggagacagaataggctagacttgcagaagaaccagaaatggggagtggggagggggagcagtgggttgagggaagacccaagtggtgccgccccagagggtgccctggtgccctgttctccttgatgaggattactggaagaacaaactttggggtggaggatgacatttaattcaagttcagttttacacaggctgccttttttttgtttttgagacagcatctcacactgtctcccaggctgaagtgcagtggtgcaatcttggctcaatgcagcctccacctcctgggttcaagtgattcttgtacctcagcctcccgagtagctgagactacaggcacatgccaccacgtctggctaatttttgtatttttaatagagaagggggtttcaccatgttggccaggctggtctcaaactcctgacctcaagtgatccacccatctctgcctcccaaagtgctgggattacaggcatgagccactgagcctggcccaggctgcctttttaatttaatttaacttaattttttatttttttgtgacactctcactctgtcacccaagctggactggggtggtgcgatcttggctcactgcaacctctgcctcccaggttcaagcgattctcctgcctcagcctcttgagtagctgggattacaggcgcttaccaccacgcctgactaattttgtattttttagtagagacggggtttcaccatgttggccaggctagtctcgaactcttgacctcaagtgatctgcccgccttggcctccaaagtgatgggattgcaggcgtgaggcactgtgtccagccagccttttttatttttatttgtagagacaggatctcactctgtctccaaagctggagtgcagtagtgcattcatagctcactgcagcctcaaactcctgggctcaagtgatcctcccacctcagcctcccaggtgcgtgccaggacacccagccaattttttaaattttctagagatgaggtcttgctatgttgcccaggttgatcttgaactcctagcatcaagcagtcctcctgcattgacttcccaaagtgttaggattacaggcatgaggcactgtacccaccctgcatttgtttaaatttttttattttgaaatcactttttctgtagattcacatgcagttgtgggaaatgataaagagagatcccacgtgtccttgaccccatttcccctggtgtaacattttgcacaactacagtgtgttaccaccagtcaacatacagaacaggggcatcactccaaggagttgcccttttatagccacaccctaaatcctccccttctcccaccatccttgatgcctggcaaccactaatctgtctccatttgtaaaattttgtgatttcaagaatactatataaatgaaatcataaagtgtataccattgagatgggcttttttcacccgtcataattccctagtgattcatccaagttgttgtgtatagcaatagtttgttcctttttattgcttagtagtattccatagtatggctatttcaccatttaaccactcactgaagaacatctgaactgtttccagtttttactatttttttttttagaccctgtctcaaaaaaaaaaaaaagtaaaaactggaaacagttcagatgttcttctgaaccatttcctacaccctctatctcctctactaccttctggccctcctcccccactctagtggggcttaagccccccaccattctgaaactgcctctgcaaaaattgtaacagtgagaaaatcatgacagagaaagacgcctgacctaaccaatccctaccttgcctttaacctccaaactgcccttagtcatccccgggcttgggccaagctaacttcggcagaaatttaatttacagtttaaatgataatagcccttccccaaaactaaactgtctttgtaaagctattgaaagaccaccaggttttcacctgggcaacatggggagattccatctcaaagtgttcactgttgcccaggctggagtgcagtggcatgatcttggctcactgcaacctccacatcccaagttcaagcgattctcctgcctcagcctcccgagtagctgggactacaggtgcgtgcctccacacccagctaattttttctatttttagtagggacgggtttcaccatgttgcccaggctaaattttttactgttatacctaaaagtgctatgaacatttgtatacagatttgcacacaaatgctaaaacactcacaattttgcataaaatggtagaagattcactgaagcttgttcaggagagcttgaaccccaggcttgaaactccagatattggaaggaagtagactggggtgagtgagactgcccagggacagcatgagaggcagaggtgagagagtccagacaaaggaacaaaggacaaagtgtttcctcaaaatggaaacacttagggggtggccaggagaagagagtaaaggaggcacagaaaggtagagaagacccaggaaggctgtgccctggagccaagaacagagtgtttcagggagtggcaggtgctgccagatggtctttggtgatgatggggaaagtgttttggtggaactgtaaccatccaatgggttcattttgcctgctgcccagatacagccaatttatcaagacaggggaattgcgacagagaaaaagttacattcacacagagccagctgaacaggagactggaattgtgttattactcaaatcagcctcctagaaaattcagagactaggttttttatttttatttatttatttattttttattttttattttttgagacgtagtctcgctctgttgcccaggctggagtgcaatggcgtgatctcacctcactgcaacctccgcctcctgggttcacgccattctcctgcctcagcctcccaagtagctgggactgcaggcacctgccaccatgcccggctaattttttatatttttagtaaggatggggttttaccgtattagccaggatggtcttgatctcctgacctcatgatctgcccaccttggcctcccaaaatgctgggattacaggcgtgagccaccatgcccagccagacactaggttttttcaaagatagtttgggggacaagggaatgggtgctgttgattggttggaggtgcaatcatagagttgtggaaaatggtcctcctacatgcagagtctgcttctgggtggggctgcaggactcattggcgagtctacgtggagccattggttgtcagaaatgcaaaaatctgaaaagatatctcaaaaggctaatcttaggttctataataatgatgttggggccaggtgcggtggctcacacctgtaaccccagcactttgggaggtcaaggcgggcagatcacctgaggtcaggagtttgagaccagcctgaccaacatggagaaaccctgtcattactaaaagtacaaaattagccaggcatgggggcgtgtgcctataatcccagctactcgggaggctgaggcaggaaagttgcttgaacccgggagacagaggttgcagtgagccaagattgcgccattgcactccagcctgggcaacaagagtgaaactccatctcaaaaaaaaaaaaaaaagttggccaggcgtggtggctcatgcctgtattcccagcactttgggaggccaaggtgggaggatcccttgagtgcaagagtttgagactgtcctgggcaacatagggagattctatctcaaaataataataatgataataatattatatgcaggagtaattggggaagttgcaaatcttgtgatctctggaataatggctggtaatatttatgtctacaccttaccagaatgtaggttcctcttatcctcctaacctcatggtctttcattagcttcacaaaggagggttagttttggggaagggctattatcatttaaactgtaaactaaatttctccctagttatcttggcccaagcccagggattactaagggcagtttggaggttaaaggcaagatgggggttcgttaggtcaggtgtctttcactgtcatgattttctcactttgcaactttttcaaaggtggttccagatagtggagggcttaagtcccactagagtggggaaggagaactggaaggtggtagaagagatagagggtgtaggtgaccctcatgggatacttgccattgaagggaggagagatggaaacatgaatttgcaggagggcactctggagagactgatcgtgtgtagctgtggatggttcccaggcacagtgtggtgagagttggtggagagtggcttctgaggagcaggaggagatggaggggagggctgcgctggcagcgtcaggagggacacagcctgcattgtgacaagggaaggcatggattcagtttggctgcagtagctgatggtttcaattttttattttattttattttatttttgagacggagtctcactctgtcacccaggctggagtgcagtggcgccatctccgctcactgcaacctccacctcccgggttcaagcagttctctgcctcagcctccctagtagctgggattacaggcacccaccaccatgcccagctaatttttgtatttttagtagagatggggtttcaccatcttggccaggctagtcttgaattcctaacctcgtgattcacccgcccctgcctcccaaagtgctggaattacaggcgtgagccaccatgcccggccagagataactggtctgatggtttcaatttgcattgcagttagaagctggggaagacatcccagtaaaagctgagaggttggaggcagagcatcggctgtggggtcatagagaggaggcaccatctgggtcttttgggagtggcacagtgtgccttggtggccactgagatgtgaggaggcctgtcatccggctagtgacatggccagacagtgtactactgtgaacttcaactgtgataactgattagaaaacatggaagaagtcagtttctcgatcccccagccaccaattcagagtctattgtttattgcagaacaaaaaagatagacacacattgagaaataaggaaggcaaggacgcccgcgtgcacacagatttgtggggtttggggagtgtgcatgaggaaaactggctaacgtgatttctggagggactttgtcacctaggattagcgtcagccatgagtaagacaggccccacgtcacagtggcttcaacaggctggaaggttatttctttcacatgaaagtccagaggaaggcagtctaagataggaagatggctgtgttctacaaggttctcagaggcccaggatttatccagcttttttttttgagacagagtttcgctcttgttgcccaggctggagtgcagtggcaggatctcagctcactgcaacctctgcctcctgggtccaagtgattctcctgcctcagtctcccaagtagttgggattacaggcacacaccaccacgcccagctaattttgtatttttagtagagacagggtctcaccatgttggccaggatggtctcgaactcctgacctcaggtgctctgcccgccttggccacccagagtgttgggattacaggcgtgagccactgcgcctggctccatccagctttttatcctacgatcctaaggttgtccttatgatccaggatggtggattgagttgctaccaccatattcttattctgggaagtggaaaggaggatgggacaaagaagagggtcacatatcaggcagttttaagaaaactttccagaagctgccacatagcacatttacattcctttggccagaacttagtcattccctaactgtaagagagcctgggaagtgtaacctttatttgggggccatctttgcagcccaaaatcttgggctctctcacaatggaaatagaagagaatgtatattggggcatagccggccatccttgccatggggttttgtcttgcttgagacagggtcttgctctgtcaagagcaagtacagtggagtgaggtgatatgatcatggctcactgtacccttgaccatccaggctcaagcagtcctcccgcctcagcctccctagtagctgggaccacaggcatgcaccaccaagcctacctaaattttgtatttttttgtagaggtggagtctcactatgttgctgcctagaatggtcttaaactcctgggctcaagcgatctcccaccttagcctcccatggtgctgggattacaggtctgagccaccgtacccagccgccacaggggttttgcctgggtctggcttgtaagggtgatgtcagagcatgatgctgggcctaccttccaaagaggctgcacttcttttttcaggaatggacaatcagaccgttctggctgtccagtcattattggatggccaaggagcagtccctgatccgacaggccagagtgtcaatgcgccccctgctatccagccattgggtgagtatctgctcaggttcaccggtgggagagtgaatggctccccgcgaagagtaggtggagcttgtgctgggctgtgggagtgaaatgcttgctgtggtccccaggacatgctctggtgtctgaaccctctcccccgcctcccagccgggatctttgggctcacggctttctctgcttagctctgaggacactgctctcaattgcttagtaaatgtggggagatgggatcaagatgcagggaatggctaagggccccaatgcctgacaacaatgcctgtgcctttgccctggaagtgattattcagcctcccttctgtggaaagaataggctgagcatgaattgctcctgtttactgggccaggcctgtaagggtcttcttttttttttttttcttttttttctttttgagacagagtgttactctgtcctccaggctggagtgcagggcacgatcttggctcactgcaacctccacctcctaggttcaagcaattctcatacctcagcctcctgcgtagctgggattacaggcgtgcgccaccacgcctggctaattttttgtatttttaatagagatggggtttcaccatgttggccaggctggtctcaaacgcctgacctaaggtgatctgctcacctcagcctcctaaagtgctgggattacctgcatgagccactgcacctggcctgtaagggccttcttttggaagtttctatgtgagactgtgttcatttattcattccacaaacatttttgtgtacttgggaatcacactaggggcagggagataaatggctgggtttgaattattgttcttatagttcttagctctgtgaccgtgggcaagtgagtgaatttctctgtggttcagttcctacacctgtaaaatagggacaattgttctgcctcataggaatcttatgagagtacttgggatttggttctagctgttgaagtttaccatggtttctacaagattaaagtttgtttctgtgttacgcgaagtcctgatgggcatttgggcatttggggtgggcatggtgagactcagactccttctttcctgtggctctactgccctcgagctgcagcccgggatggctgctctagctcccactttgattggcacattccagccaacatgaagggaagaaagagggaagtggaattcataccctttcgttttgttttgtttttgagatggagtcttgctctgtcgcccaggctggagtgcagtggcgcgatctcggctcactgcaacctccgcctcccgggttcaagcaatcctcctgcctcagcctcctgagtagctgggattacaggtgcccgccaccatgcccagctaatttttgtatttttagtagagatggggtttcaccacgttggtcaggctggtctcaaaccccctgacctcatgatcacccgcctcggcctcccaaagtgctgggattgcaggcgtgagccacaccgcccggccaagtcgagacaggatttcatcatgttggcctggctggtctcgaactcctgacctcaggtgatccacccacttcagcttcccaaagtgcagagattacaggcgtgaaccaccatgcctggccaaaaaacttctctttaattaaaaaaaaaaaatagagatagggtctctctgtgctgcccaggctggtcttgaactcctgagctcaagcaatcctcccacctcagcctgccaatgtactgggattgcaggcatgagccacagtgccctgtccatgccctttccttttccttttatgaggaagttgcagatacggtacagttctattgttgtcccattggtgagaattctgtcacatgacattcctagctgcagagaagcctgggaaatatattatttaactatgaagccatgtttcccactgaaatttgtattattgtataagaaggatacgagttgagagtggtgtgcactatgatcatgcctgtgaatagccactgtgctgcagcctgggcaacacaacaggaccctgtctctctctttttttttttttttttgagacggagttttgctcatgttgcccaggctggagtgcaatggcatgatcttggcttactgctacctctgtctcctgggttcaagtgattctcctgcttcagcctcctgagtagctgggactacaggcacctgccaccacacccggctaatttttgtatttttggtagagacggggtttcgccatgttggccaggctggtctcgaactcgtgaccctcaggtgatccgcctgcctcagcctcacaaactgctgggattacaggcgtgagccaccgcaccctgcccaatttttttttttttttttttttttgagacagagtcttgctctgttgcccaggctggagtgcagtggtgtgatctcgctcactgcaacctccacctcctgggtttaagcaattctcctgcctcagcctcctgagtagctgagattacaggcatgcaccatcatgcccagctaattttgtatttttaggagagctggggtttcaccatgttggccaggctggtcatgaattcctgacctcaagtgatccacccaccttggcctcccaaagtgctaggattacaggtgtgagtgagccacctcgcctggcaacccgtctcttaaaaaaataaataaataaaaaaggatacaattagaattgaataacaattagacatttctgctaccacatgttgggtgcttgacacagtgagcgcatagctgtggtaggccctcagcaatggatggtgttaactgtagttaatcattcatttagtttttcattcattcaacaaacgtccattgagaacctcctctgtgtccaggagatattgtagttatggtgataaataagacacatgtccttcccttaggggactcacagtctggtgttgataagaaaactgttatatgataggtgtgccagaggaaggaactatagccgctggctttagaaaaacttcctggagaggtcggtgcagtggctcacgcctgtaatcccagcactttgggaggctgaggtgagtggatcccttgaggtcaggaagttcgagaccagcctggtcaacgtggtgaaaccccgtctctactaaaaatacaaaaattagccgggcgtggtggcgcatgcctgtaatcccagctactggggtggctgaggcaggagaatcgcatgaatatgggaggcagaggttgcagagagctgagattgtgccactgcaccccagcctgggcagcaagagtgaaactctctctcagaaagaaaaaaaaaaaaagaaaagaaaaggaaagaaaaagaaaaaaagacttcttggaagaggtgacagtcaagctgaggcttgcagaacaagttgtcctcagagaggcagcctggcagggcgaacggtggatgcaaaggcatgggaggagtatgatcaggtggctcatttggggactgatgaataaattcagacaggataaaggttctggagttctcaactttgtagtgaacatactttactgttttttgatttctaattaattggtacctggccacatatggctatccctgcaggaaactgtgtggttttttttcttttttttgagatggagtctcgctctgttgcccaggctggagtgcagtggcacgatctgggctcactgcaacctctgcctcctgggttcaagcaattctcctgcctcagcctcccgagtagctgggactataggcgcgcaccaccatgcccagctaatttttgtatttttagtggagatggggtttcgccatgttgtccaggctgatcttgaactcctgacctcaggtgatccaccctccaaggcctcgcaaagtgctgggattacaggcatgagccactgtgcctggccacctgtgtggcttcgaaaactcccaggaagcacatagttgatggctgacacctgcatgtcaagtcgcagcatgccccccagattgctgcttgtggtcagctgcagttctcctgtctcatactgtgatgccccttgacatagtcttgcttttttttcattactttaccttcatctgtggcctcttcccactactctgcgggtatgaccccagatgacgaggatgtatttctctgcgggaagtgtaagaagcaattcaactcgctgccagcgtttatgacccacaagcgggaacagtgccaggggaatgcccccgccctggccacagtctcactggccaccaacagcatctacccaccttcggcagcacccacagcggtccagcaggccccaactcctgccaatcgccaggtatttgttcatttattcattcaacatgtcttttttgagggcctaacatgctcaggcactgtgctgggcactggggctatagcaatggataagacagaccaagtccctgcccttgtggagtggggcgagatggatggtgcacatgtactgttttcagcatgttaaatgcggagagataggggatgccagacggggatgggaggttttgccatattgtctatcgtgcttggggaagagctctgtgaagaggtgaccaggaagaatactatatagcaggtaaaaggttttgtatgaaaaatcaaattgtagaataataagtagataatatattattatttttaaaatctgaaacaatagtactatataatttccgcagttacttaaataagtaggaagaacataccagatagacctaaggaggtgtgggaatgagttatgcggctggtttggggaaggaagcaggagccaggtgcagggatcagcagatgcagaggccttgaggcaggagtgtgctgggtttgttccagaactataaggaggtgagagtggctgggactgagtaagtaggaaggtgggaggtgctaggagaggcagcaggagggtcttggcagatcgtgtagggtctgggcctttttttttttttttttttgagacggagtcttgctctgttgcccaggctggagtgcagtggcgccatctcggctcaccgcaagctccgcctcctgggttcacgccattctcctgcctcagcctcccaagtagctgggactacaggtgcccgccaccacaccaggctgatttttgtatttttagtagagacggggtttcaccatgttagccaggatggtctcaatctcctgacctcgtgatctgcccgcctcggcctcccaaagtgctgggattacaggcgtgagccaccgcgcccggccttttttttttttttttttttttgagacggagtttcactcttgttgcccaggatggagtgcagtggcaggatctcggctcactgcaacctccgcctcctgggttcaagtgattctcctgcctcagcctccagagtagctgggactacaggcgcgcaccaccacgcccagctgatttttgtatttttagtagagatggggtttcaccatgttggccaagatattctcgatctcctgaccttgtgatctccccgcctcggccgcccaaagtgccaggataacaagtgtgagccaccacacccagccgctggggcttttactgagaatgacatgggagccattggaggctgtcaagcagaggagggacatagtgacttttatcaggtcactctggctgctggacagagaataggttttgagggagggtgagagagaaagccaggagacccgttgagggactgtagtgcaaatccaggcagtggatgcgggtagcttgaccagcatgttggcagtggaggtggtgagaaagtgtgagattttagaaatactttgaaggtgttgctgatagaacttgtgaattgattgggtgaggagtgtgagatcaagaagggtcacagaggactcctgatttagagttgccactagctgaagggaggaggctgtgaggagaaggttttggggggatgtcaggagttcagctgggcacgttgaagttgagatgcctgccaacctttaaacggaggcagtgacaaagtagacaatgtagatttccaagtccggaggccagagcagaggacaaggctggaggcatctggggaagcttccagagtcctcagccgaaaacacggttctggagcaaagacaccctggatagggggctcatagaaagactaaaggatccctcataaaggaggctgggcatatctcaggatgccaggtcaaggggtcagattttcaactggcttccttttctttccttatccctttagaacattatcttcattcattgtataggtgtcatttctgccatcactatgaaagcattcaccccagacccataggacatatagactgaaacaggcatcttctggcataaaacagtcattttggccgggcgcggtggctcacgcctgtaatcccagcactttgggaggccgaggcgggcggatcacgaggtcaggagatcgagaccatcccggctaaaacggtgaaaccccgtctctactaaaaatacaaaaaattagccgggcgtagtggcgggcgcctgtagtcccagctacttgggaggctgaggcaggagaatggcgtggacccgggaggcggagcttgcagtgagccgaggtcccgccactgcactccagcctgggcgacagagcgagactccgtctcaaaaaaaaaaaaaaaaaaaaaaaaaaaacacagtcatttttctcactgcttgactgtgagttttgctagtagaaaatattcccctcaccatctcttacctttttttttttttttttgagacaaggtcttactgtcgctcaggctggccttggctcactgcaacctccatctgccaggttcaagtgattctcctgcctcagcctcctgagtagctgggactacagacacccgccaccatgcccagctaatttttgtatttttattggagatggggtttcactgttggccaggctggtctcgaactcctgacctcaagtgatccgcctgtcttggcctcccaaagtgctggaattacaggcatgagccaccgtgccacaccagatattcttcttgacctaagatacttgtggacttcatgtggacatgtgttcagtgtttctctagcatagatacaaggaagtatttttttttctcttgagatggagtctcactctgtcgccaggctggagtgcagtggcacgatctcagctcactgcaacctccatctcccaggttcaagcggttctcctgcctcagcctcctgagtagctgggactacaggcgcgcactaccacgcctagctactttttgtatttttagtagagatggggtttcaccacgttggccaggatggtctcgatctcttgacctcgtgatctgcccgcctcagcctcccaaagtgctgggattacaggcgtgagccaccatgcctggctgatacaaggaagtattattactgagtcatagggtatgtactttgcagagggatgtgagttattctcctcatttgttttttctttcattccgtttttgtttgtttgtttttagagacagagtctctaaaaccacaccagctgcgtgcaaaaccacaccggctaatttttgtatttttcttgtagagacagggtttcaccatgttgcccaggctggtcttgaactcctgggttcaagtgattcacctgcctcagcctcccaaaatgctgggattatagttgtgagccaccgtgcccagtcttatcatcctcattcagtagatgattaaatggaggcacagagaggtagagtgacttgcccagggtcacacagcagggagcagcagaggtagaaatggaatccacgtctgtgggattccagaacctggatcttttgtgccatgccctcggcttacttacagagcctgacatgtccacacatgcacacacgcacacatgagcacacacacactctgtctctctccgtctcactcattctctctctcccactgtccagatctccacatacatcacagtgcccccgtccccactgatccagaccctggtgcaggggaacatcttggtgagcgatgatgtgctcatgtctgccatgtcagccttcacatccctggaccagcccatgccccagggccccccacctgtgcaggtaagaaggtgtgggcttctcacagggtcttgattccagacctgtacattaactcctgcagattcagaatcttgtagaataaagggggcctggccccagctctccctgatgctgagggaggctatcagctttcccttgtccagctctgctatagatggggaagctgctacgtctaggtggggacccagaacatgtggggctttgtcaatacagtgcagctattttgacttttttttttgagatggagtctcactctgttgcccaggctggagtgcagtggcacgatcttggctcactgcaacctctgcctcctgggttcaagtgattcttctgcctcagcctcctgagtagctgagattacaggcatgtgccaccacagccagctaatttttttttgtatttttagtagagacaggttttctccatgttgatcaggctgatcacgaactcttgacctcaagtgagccccccacctcagcctcctgaagtgctaggattacaggtgtgagccactgtgcccagccaatttttgtatttttaatggagacggggtttcaccatgttggccaggctggtctcaaactcctgacctcaggtgatcctcccaccttggcctcccaaagtgctgggattacaggattacaggtgtgagccactgcacccagcctgacttttgtttttgttctttttttttttttgagacagagtcttgctctgttgcccaggctgaagtgcagtggtgcgatcttggctccctgcaacttccacctcccaggtccaagcaattctcctgcctcaacctcctgagtagctgggattacaggtgtgcgccaccacgcccagctgatttttgtatttttagtagagatggggtttcactgtgttggtcaggctggtctcaaactcatgacctcaggtgatccacctgccttggcccaaagtgctgggatcacaggtgtgcgccaccgcgcccagccttgtttttattcttaacaagtgtcccatgtctattagaaaaatagaaaatgcacagtagctccctgggatttaaaaaaaaaatttttgtagagatgaccatctccctttgttgtccaggctgatcttgaactcctgggctcaagggatcctctagtgtcggcctctcaaagtgctgggattgtagacgtgagctactgcacctggccaggattttttaatacaaaaaagatctgtggccaaaggaacctaaggtggaggtgttttacttctccccttgctgtgtccctggattcttcctgccatatagaaatccttttgattttctcaaccgagactttttttttccctgtttgggaacccaacgaacacagtgaagaagaggaccccgtgtcctttatgaaatgctgatcagcatcatgtttttatttttgagacagcgtctcactcaggtcactcaggctggagtacagtggtaggatcatagctcactgtaacctcaaactccagggctcaagcaatcctccctgctcagcctcctgaggagctgggactacatacatggtgccaacatacttggctaattttaaaaaaaaatttttttttttttgagatggagtctcgctcttgtcacctaggctggagtgcagtggcaccatctcggctcactgcaatctccgcatcctgggttcaagcgattctcctgtctcagcctcctgagtagctggtattacaggcacccgccaccatgtctggctaatttttgtacttttagtagagacaaggttttgccatgttggccaggctggtcttgaactcctgacctcaggtgatctgcccaccttggcctcccaaagtcctgggattacaggcgtgagccaccgtgcctggcctaaaaaaatttttttttagagacagagtctcgctatgttacccaggctggtcttgaactcctgggctcaagcaatcctcctccctctgtctcccaaagtgctgggattacaggtgtgagccactgcacccagcagtaccatcattttaacaactgcaaaggattccaccatatggataggccatcttctgcttagccaagtttctatgtatagacatgtaggtcattgctgttttttgcttttatgaaaatggctggagtcactatccataaacagacatctttgcccacctgcttgattttttttgtagcataaatttctagaagttactggctgcgtttcacgactacccacacattcatgattctctcaaaagactcacgggactcagaggtagttgtactcatggctgtggtttattacagcaaaggaacacacagcaagatcagcaagggaaaaagacacatcaggtggaatctggaggaatccagagttctctgtcttggggaggtggggagaggttgcacaaaacacacttcttcctgcagcagtgaagtctagcaacatgtgtgctgtgtttctacccagggaaacacacttcagactccaaagccagggttttgtttgtttgtttgtttgtttgtttttctgagacagggtctcacttcagctgccctggctggagtgcagtggtgcaatttcggctcactgcaacctccacctccctgggctcaggtgattctcccacctcagcctcccaagtagctgggactacaggtgtgcaccactatgcctggctaatgtttttgtatttttagtagagatggggttttgccatgttgcccaggctggtctcaaactcctggactccacccgcctcagcctcccaaagtgttgagattacaggtgttagccgctgcaccaagcccaaggccagggtttctgttagggattggtcatgtaggtgaccagccaccatgaccaaaattccagactcccagaagagaaggaagtgttcaccatgaatcacatattttgtccaagcagtctacataatctggtacaatagaacagtgccccaggtgggcaaaataagccttatcaacaaaggagatgtcccacaaaccagattctcagatcccagtcacgagctagtgctgcaagcaagcccccccccctttttttttaattttataactttatttgaggtatttgatgatcagcgattagttctcatccacattgactgtctgtagatttttgaaagtggtaacaggtacataggtaaccaaagtatagagcttatttggtggatcttcatcctcataacattttctggacaaccgcacacggatgcagtatgggacattctttattcctttgtctcagacagctttgttgaggctggtatcaatgcacacatctggagttcccatctccttcatggcaagtttccgaatctctttgagtgcctgaggagcacgcttcttgaagccactccatggatgcacttgtgaatgttgatggtgtattctcaggtcaccacctcattgatggccgaatgaccctttttcttctcgccacccttctttctgggagccattctgctgggtccaagatggaaagggaagcccttcttaagatagcaacattaggctgctatattaactcttttctgcatgaatgaggtcatttttgcctattttcttttcttttttttttttttttttgagatggagtcttgctctgtcacccaggctaaagtgtggtggtgcaatctccactcactgccagctccgtctcccaggttcacaccattctcctgcctcagcctcccgatagctgggactacaggcgcccgccaccacgcccggctaattttttgtatttttagtagagacagggtttcaccattagccaaggttgtctcgatctcctgacctcgtgatccgcccgcctcagctcccaaagtgttgggattacaggcgtgagccactgcgcccggccatttttgcctactttcatagggaaaagggatagcagcaccaagctgaggcttccttcgaattctcccatgactttgtttccccaacctctcttagcccctctcctgagctgtctggtaagtagctgtttttccacctggctggctaaagcaaatgtccttccttcctgataaataagacaactggtatcaagaggctataacactttttcttttctgatttcagagcagcctgaacatgcattccgtgcccagctacctcacccagcctccacctcctcctccacctcctccaccactgcccccaccgccaccacctcagcctccaccacctccaccccagagcctgggcccccctgggcgtcccaaccctggtgggaacggtgtggtggaggtgtacagtgctgctgcgcccctggctgggagtggaacggtggagatccaggcactggggatgcagccctacccacccctagaggtgagcagagggggcagggtggaagaggacactggtcatggacatcatggccaacccggacccatcctgagcaccagctgtgtgccagacactgtgctggggataccatgaaaaccagacccggtcctggccttcatggggtgtaccacatcacaggggagaaggactttaatcaaagcatcacacccacagatgtaagatgcaagccatgagaaggtggaatggagtacaggttgtagcagaaatataagctgcctgcaggtaatgctcagaacagtcagagaatgcctaccttttcaggcaaaaaaaagaaaaaagattcaaaaaaattatctgcctgagtgtctcttacagtttttaataagctaggtgtatcagttagctattgctgggtaagaaatatccatcaggcatcagtggcatataccaaaagtgtttattattcacgtgtttacagtggtcagctagacaactgcggatcttggctgggctcactcatatgtctgaacgttggctggctgtcagctgctctaggatggcctgggctgggacaagtggggtgactcagctctgttctgcgtgactctcatcctccactaggttctcatggccatggtggaggtgcaaaaatgcagacagaaatgcccaaggccttttgaggtttaggcttgtaagtaacacagaatcacttctattggccaaagcagatcacaagtccagcttagatagcgcaggtagggaaatagatgccacctcttgatgggaggaactgcagagtcacactgcaaaggcttgggtacagggaggggcaaagaattggtgccataatacaatcaatgtaccatactaattccctgccaatgagctctaagttataggccatctacttgaaatgcactgagttcatagaaccttccaagacaccagtgctagagggtatggttatgacagaaacaacccacctgcactagaaatcacactaactcagactcaccatagaatccagccacagacatcccctgtcaggtagtctctttatgtaaagagagcccagaccagtgggaagatcccaccacgaggcattcacgtgatgttctgaggggctgcgaggggatttgccctaccctgggagaatagaacaagcttctctagggaatttattgcattgagaaaaagttaagttagtgggatgctgagataatgctggtggcttgtggtagtcagaggggaccagcccagagaggaccagcacagaaggagctgctgctgttgattttccatgtagatgagggtatttgagggcagggtctgagtcttactagactttgcatccttagcacctagcagagcactcctagagtagatatcttacattggactgtctgacctcagtctgcgctcctctaaaatgggaactctcctgaaaagctgttgaggataataagagcctatgccagtggcagtcacattaattactcagtaatgccttgagtgatggctgaatttattcacgtgacaagtatttatttatttatttgagacagagtctcactctatcgcccaggttggagtgcagtggtgtgatctcggctcactgcaacctccacctctcaggttcaagcgattctcgtgcctcagcctcccaagtagctggtattacaggtatgagctaccacgcccaactaattttttttgtatttttagtagaaacgggtttcaccatgatggccaggctggtctcgaactcctggcctcaggtgatctgcctgccttggcctcccaaagtgctgggattacaggcatgagccaccacacccgtcccaacaagtatttattgagtgctgtattggtcagggtttggtcaggaaaatagaaaccaggcaaggtatttctgcagagggatgttttttcttttctaaattagagataggggtctcactttagcccaggttggtctccatctcctggcctcaagtgatcctctcacctcagcctcccagagtgctgggattacaggcatgagccaccatacccggccagattttataattttttttgtacctttttttcagctttgtctgattttattactccaactgtagctttctatttatttatatttgtctgaaatattttttcaactttgggctttttgctgagttgaattctttttttttttttttttttgagactgagtcttgctctgtcacccaggctggagtgcaatggcatgatcacggctcaccacagtctcgatctcccaggctcagatgattctcccacctcagcctcctgagtaactgggactacaggcatgcaccaccatgcccatctaatttttttaatgttttgtggagatgagatctccctatgttgcccaggctagtctcaaactcttgtgctcaagtgatcctccttcctcggcctgccaaagtgctggaattacaggcatgagccatcgtgcctggccagagattttggataggacacctcaggaagaccaatggatgatgaataggccaggcacaggggctcacgcctgtaatccctgcactttgggagcccgaggtgggtggatcacttaagctcaggagtttgagtccagcttgggcaacatggtgaaatcttgtctctacaaattacacaaaaattatctgggcatggtggtgtgtgcctgttatcccagctatttggtggggtgaggcgggagggttgcttgagcctgggaggtcaaggctgcagtgagccgagatcacatcattgcattccagcctggacaatagagcaagaaaaatctgaatgcctcagaattcatttggtaatttctcgtggcttcagttctcagtgaagagaagcctgctactctggcattgggtagtgtcagtcaggaagtggagcagctgggggagcacagacccctctgacttcctggttctctctctctcttttttttttttttttgagacagagtctcactccatcgcccaggctggagtgcagtggcgcgatctcggcccactgcaacctccgcctcccaggctcaagtgattctcctgccttagcctcctgagtagctgggattacaggcacacaccaccatgcctgacttaatttttgtatttttagtagagatggggtttcaccatgttggccaggctggtctcaaactcctgaccttaggtgatctgcccaccttggtctcccaaagtgctgggattacaggtgtgagccaccaggctcagccacctagttctcttaatgctagcaaagtaccactgataagaatagacagggcaaataataacagctaatgtgtattgcatgctcactctatgccagtcactgttctaagccctttatatgttgcttcatttaatcttcacagtaaccgcatgagaggggtactatgatgagtcccattttacagatgtggaaactgagacagagaaattaaaaagatgcctaaggtcacttcggtgctaagtggaagagtcaagatttgaatccaggcagcctggctccatagctgttctggcctcctggcttcatgaagttctaagggagcttgggagtggcttgggtgaccgggccaggtggaggggctgtgatggtgatgtaggggagagcggctgaggtcaatcagggaggcagggagagtgcccctggctgggagctcttccccttccctggcagggctttttccctgactgtgttgtcctcctaggtgccaaaccagtgtgtggagcctccagtatatcccacccccacagtgtacagccctggcaaacagggattcaaacccaaaggaccaaaccccgccgcccccatgaccagcgccaccgggggcacggtggccacctttgactctccagcaacgctgaagacccgacgagctaaaggtgccaggggactcccggaaggtgggcccccagcctgccatgggcatctttcctcaacattggccaatccacaagctacttggttctggtcttcccttttatggttgttcaagtttggttgcatgtaatagaaaattcaaaatatcaatgacttcaaaatgatagaattttgtttctctcctgtgtaagtcaaggccagaagccagacaatctggggatcatgtgactgcatgggcaccaggcaccctcgtttcttctgtctttctgtttccaccacctccagaacatggtatcagttatcctggtgcctcattgtctaagatggctgctggagctccagtcatcactttaatattccaggcagtaagaagaagggaaagagaaggataaaaggggcttctcccagcttctagaagttctgtttgatatttttgctcatatctcattgatgaaaacttagtcacatggccatacctagctgcaagagaagctgggaagtgtctattttggctagggacattgatattcccattatgggatttgtgaggagtgaagaaggagagagtggatattaggcaagcagtagtatctgccatcctaatgcagatgctaagtatggggtgggaggtggtgtcagagcaggcagcagatggagaggatagaaattgagaatttttcagtggctttccagtcaactactcctccccttccttccttccacaatgatgtattgagcatctgtgtgccaggccccatgtcaggcactggaatctagtctcttggtctatgattccttctgccttcagtttaatggaagagacagacagggaataaataaataaatatttctgggttgctccaggaaggaggttaatgggtcttatgattgagaataactagggagaggctggaaaatgattctacctattcatgtgggaggagaaggaagcagccttgtgggtatctgtgggacaagcattccaggcaagggggaacagcaggtgcaaaggcccggaggcaggaacatgcttgaagtcttttaaggttagcaaggttagctaggagtccactgcagctggatggagagaatgatgaggttgtcaggagtaaggggatacagagtgctgtgggccatggcaaagagcgtggatttgattgtagggcagaggggagcctttgaaggattcatcttgctttcccagctggagcatgtcctgggctttcctctccaggccctgtgaagctctcccatgtctcctccctggcctgtgtatgggcatagacttccctggggtatggattgtctggctcagatacagtagtcagaggctgcccttggtgccctgagctgcacccccagcctcattgtcccctccttccacttgtctttcagctgcagggaagccaaaggctcagaaactcaagtgctcatactgtgacaagtcattcaccaaaaactttgacctgcagcagcacatccgaaggtacacatgcgtggtgaggcaggtggctcctgggcaggtgtggctgggaccatctgtgctggaagcgagactcccttctcagcccctagcctgtggggtgacccaggctgcacttgcatgttcaggctgtagtccaggtcgggtggttttccctcttctatctcagaggctgtgggagggacctgtgaaagctgtgggacctgcccatagagactgggaaggtcagggatgggccgtgtaggggaagaaaagcactgaacccagaggggtttcacagatgtgttagtgctgtcttaggcctcccctctgcagaacaggctggcctaccagggctgccatactctgcaaataggactctgtgagctctctgctcactccagactaaccatgcagggatcccttctgggccttggtttttccatctgtggaaggggaggctgggcttgttcatttctcacacagtgaaatgcactggtacatgagatgattttttttgagactgagtttcactcttgttgcccaggctggagtgcaatggtgcaatctcggctcactgcaacctctgactcctgggttcatgtgattccactgcctcagcctcccgagtagcttggattacaggcatgcgccaccacgcccggctaattttgtatttttggtagagatggggtttctccatgttggtcaggctggtcttgaactcccaacctcaggtgatccacccgcctcggcctcccaaagtactggaattacaggtgtgagccaccgtgcctggccgatgagatgatttttggtggttcatgaatatggggttgaaaagttctgaaaaatgtagtgggaaaattattccctttgcaatttcagtccttaggaagtcatagagaaaacctcaatttggtataattggtctttagcacctttggtatacatgctcgtctcttataacaaaaggagagagagagagagggagagagagagagagagggagagagagagaacaaacctcacattccagccatggctggcaacagcttctatctagaccagggtttttcagccttgccactactgacgttttggatcttggatcacatcattccttcctgtagggagctgacctgcacatcgtggaatgtttaggagcatccctggcctctaactattagatgctagtagtactgcagctacagctgtgacaatcaaaaatgccaaatgttccctggagggcaaaactggcctcagttgagaactggtctacacaagtgctgtcgctgtccaatagaactttctgtagcgatagaaatgctcaaattgggttgggcatggtggctcacgcctgtaatcctagcactttgggaggctgaggtgggtagatcacttgaggtcaggagttcaagaccagcctggccaacatggtgaaaccccgtctctactaaaaatacaaaaattagttgggcatggtggcgggtgcttgtagtcccagctactctggaggctgagacaggagaatcccttgaacccaggaggcagaggttgcagtgagctgagatcgtgccagtgcactccagcctgggtgacagggtgagactctgtctcaaaaaacaacaaaaaagaaatgctcaaactggcgctgtccaatatggtagctactgactatacatggctgttgagcacttggaatgtggctagtgagtctgagaaactgaattttgtattttattttattttaatgaatttaatttttttttgttttttgagacagggtcttgctctgttgcccaggctggaatgcagtggtgcaatctcagctcactgcagcctcaacctcccaggctcaagcaatccttctacctcagcctcctaagtagctgagaccacaggctcgctccaccacacctacctaatttttgtattttttgtagaaacagggtttcatcatgttgcccaggctggtcttgaactcctgagctcaagcgattcttccgtctcagctttccaaagtgctgggattacaggtgtgagccaccatgctgggcttgaatttaaatttaaatagccccatatggcttatgtctaccttatgggacagtatagctctagatcttgcatttttttttgtttactttatgataagtggttttccacatagaataacaaaaataagccttttttaaagattattttattttcatttattttatttttagagacaaggtctcactctgtcatccaggctggagtgcagtggcatgatcatagctcattgtaacctccaactgatgggcttaagtgatccttccgcctcagattcccaaagtgctagaattacatacgtgagccacaaaattattttaagttttaaaaaagtgagttgatttgaagaaaaatgttaaactgtggtacaagtgctgtgctgtgacaacttgaatgttttttgcttcaaatgacagaagtccctatttatttatttatttatgagatggagtctcactctgtcacccaggctggagtgcagtggcgcaatcttggctcactgcaacctccgcctcctgggttcaagcaattctcctgcctcagcctcctgagtagctgggattatagatgcacaccaccacacccagttaattttttatctttagtacagacagagtttcaccatgttggccaggctggtctcgaactcctgacctcaagtgatccacctgccttggcctcccaaagtgctgggattactggcgtgaactactgtgccaggccagaagtcctcatttaaatgggcttgaacaattaggaaatgttctgtcacagtatgagatggtcagaggagggcggctccagggtttgttgatgagcagctcagtaacgtgacccggaacccagggtctttccatctctggtctgcctgcctcagcgaaggggcttgtcgccgtggtgtcagaatgtggcaagtggcatctggatgttctttctgggccttccttgtggctgtgagctcctgggctgaggcctcgtccccgttcctgcaggagggcactgacaagcttgtcttccacagccacaccggtgagaagcccttccagtgcattgcatgtggccgtgcctttgcccagaagtctaatgttaagaaacacatgcagacccacaaggtgtggcctccaggacacagtggtggcaccgtgtctcgaaactctgtgaccgtacaggtcatggccctgaaccccagcaggcaggaggacgaggaaagcacaggtgggtggaagtagggaacgccatgcttcccacacctctcttctgccgcttcacaggttttattgctagctgtgtgaccttgggcaaaccccatgacctctctgggcttcaatctacctttatctataaaatgtggcataagatgaaaggaaggatgacaaacatacaacatgtgtggcattactctaatactgtacccatggcagacatcactattcaatcacctacccattttttgctgagcctggatctcacctcagaatctttttttttttttaacttatgagttatttctggaattttccatttaatattttcagaccatgattgactttgggtaattgaaatcatggaaagcaaaactgcaagtaaggggagactactataaaataaaaatttatgatcccctactgttaaaataaatgaatgaataaataaataggggataaaagaaagccctttctttttttttttatttttactttaagttctgggatacatgtgcagaacgtgcaggtttgttacataggtatacgtgtgccatggtggtttgctgcacgtatcaccccatcatctaggttttaggccctgcatgcattcggtatttgtcctaaggctctctctccccttgtccccagccccccgacaggccctggtatgtgatgttcccctccctgtgtccatgtgttctcatcgttcaactcccacctatgagtgagaacatacggtgtttggttttctgttcctgtgttagcttgctgagaatgatggtttccagcttcatccatgtccctgcaaaggacatgaactcattattctttatggctgcatagtattctatggtatatatgtgccacatttaaagaaagccctttcttatagtaaaatgtgaactgataaaagtagaaataatgattaaattagaaaataactatttgacagccaccatagtaatacagtcacatgctatgtaaggatgtttccatgagtaacagatggcatatgtgacagtggtcccataaaattataatggagctggaaattttctgtcatctagtgacattgttgccattgtaaaatcatagcacactgcattaccttttctatgtttaagttacattcatttaaaaaattttagatttagagggtacatgtgcttgtttgttacatgggtattagatgcataatggtggtggctgggcttctagtgtacccatcacccaaatactagacattgtaccaacgggtagtttttctttttttgagacagagtctcactctgccacccaagctggagcgcagtagtgctatcagctcactgcaaccgctgccttccaagctcaagtgatcctcctgccttagcctcccgagtagctgggaatacaggtgccctttaccacacctggctaattttcgtatttttagtagagacaaggcttcaccatgttggccaggctggtctcaaactcctgacctcaagtaatccacccaccttggcctcccaaagtgctgagattacggacgtgagccaccatgcctggctaacacgtagtttttcaacccttgccttccctcaccatccctgctcagaatctgttttctatatgttgctccaggcagtcactgtagttgatcagaagttgaaagctatttgacctccaaggttagttggtctccaaagctctttatacatgtgggattctcatcatttgtccctgagctaatgctcctatccctgatattgatttagtttctttcttgcatgaggactgagaacttactaggtttagagcagcgctgcccaacagaaatatagtatgaacaacatatgtaatttaaaatgttcagccgggcatggtggctcacgcctgtaatcccagcactttgggaggctgaggtgagaggatcttttgagctcaggagttcaagatcagcctgggcaatatggtaaaacccatctctctcttttttttttttttttttttctgagacggagtctcactctgttgcccaggctggagtgcagtggcgcgatctcagctcactgcaagctccgcctcctgggttcacgccattttcctgcctcagcctcccgagtagctgggactacaggctcccgccaccatgcccggctaattttttttgtatttttagtagagaacggtgtttcactgtgttagccaggatggtctccatctcctgacctcgtgatccactcacctcggcctcccaaagtgctgggattacaggcgtgagccactgcgcctggcccccatctctatttaaacaaaaagttctgtctttaatggcaaaaataatcttaaataaataaatgaaataaaattttctagtagctacattaaaagcaatttttaaaaagatcaaattaattttaattatatatcttatttaaccatatatgtgtatgtgtgtatatatatatgtgtgtgtatatatatatgtatatatatgtgtgtgtgtgtatgtgtatatatatatatatatatttttttttttttttttttttttttttttgagatggagtcttgctctgtcgcccaggctggagtgcagtggtgcgatcttggctcaatgcaacctccacctcctggtatttaacccgatatattaacattattattttaacatataatataaagattgaatatactttatattctttttttaataaatttttgaaatccagcaggtatatacacttatagcacatctggatatggactggacacatttctttctgttttttgttttgttttgttttgttttttagttagggtctcattctgtcaccccagactggagtgcagtggtgcaatcataactcattgtagcctcgaactcccggactcaagtgatcctccctcctcagcctcccaagtagctgggatgggggtgcaccactgcgcctggctaattgttaaaaattgtttttgtagagacagggtcttgctttgttgcccaggctggtctcaaactcctgagctcaagtgatcctctcacctcagcctcccaaagtactggaattataggtgtgagccatcatgcctggtgccacatttcaagttctcagtagccacgtgtggctcaggaccactttattggatagtgtaaggccagagtctaagccattcccatgtagacccaagggtgagcaatgccaggcacatgctaggtaatgaagggagtgttttgctgggaaagcaatgtgtgaccacttttatctgaccttccttcaggcttcctgttggaactagccctactgtgtgccttctgagttcttgtgaactccttttttttttctttaaaaaaaattttcttttgagacaagatcttgctctgtcacccaggctggagtgcaatggcatgatggtggctccctgcagcctcaacctcccgggctcaagtgatcctcccacctcagcttcctgggtaggtgggaccaccgacacatgcaaccatgcccagctaattttgtttattttttgtagagatggcgtctcattatgttgctgaggctggtcttgaactcctgggttcaagggatcctccttcctcggcctcctaaagtgctgggattataggaatgagccatcacacggccctaaagaataaataatttcttccattttttttgaaactcctttagtgcctagcaccaaaggtttaaccatttagcaaacatttatagaggcctactatgtgccaggccactgggcctgcagggatgaggccagaggcccctgatgtcaaggaaagtgaggaacagtgtagtgagggaaggatgatgaaacagatgattacaattttttttgtttgtttgtttgaaatggagtctcactcttgttgcccaggctggagtgcaatggcgcaatattggctcactgcgacctccaccttccgggttcaagcaattctcctgcctcagcctcccaagtagctgggattacaggtgtgcgtcaccacgcccagataatttttttgtatttttggtagagacggggtttcaccatgttggccaggctggtctcgaactcctgaactcaggtgatctgcccgccttggcctcccaaagtgctgggattacaggtgtgagccaccgcacctggtgatgattacaattattattattattttttgagacagaatctcactctgtcaccaaggctggagtgcaggggcacaatctctgctcactgcagcctccgcctcccaggttccagtgattctcctgcctcagcctcctgtgtagctgggattacaggcaccctccaccacgcctggctaatttttgtattgttagtagagatgggctttcaccatgttgggaaggctgatctcgaacttctgacctcaagtgatccgtccgccttgacctcccaaggttctgggattacaggtgtgagccatcgcacccggccagatgattacaattagaagaggggactggggaggcattaggagtacaactaggatggtgtttagaatttttaacaaccatggagaggtctacagtgtctgaggggaaggccagagaggggaggctcgaggcagcagctgtttctcactcagaaaggaagcatttctgtatttgagcctgggaatggccgtaccagtgcacagcagctgagtgtgagtgcagcaccttaagcacagagtctgacccaaagcgagtagcaggtgccgggtgaacacagaggagcacggagtaggggttctgtgcatccttcctgaatgggccggctccttgtcctgacttccctggctttctccacagggttgggccagcccctgccgggtgcgccacagccccaggccttgtccacagctggtgaggaagagggggacaagccggagtccaagcaggtggtcctcatcgacagctcctacctgtgccaattctgccccagcaaattcagcacctacttccagctcaagtctcacatgacccagcataagaatgagcaggtaggtggatggtggcagcaggggcccacaccacaccagtcgaaacctttcactggtgctagggtcttgaatgctgcctagaaaggggtaggaaccagtgagtcagaccttccacggctctattccccccgggttagattccgagcaggggattgatgaagtaaggttacccttggggcaaatcacagaaaactttgactctcctccagacctgagacagctgactccacccagcgtaaggactctgtgtctttccagctctggtctctgtcatctcagggtgtggccttgacctctcctgatggctcaccttgtactcctgtcctgggatggtgatcacttctttttttttttttgagacggttttactcttccgcccaggctggagtgcagtggtgcgatctcagctcactgcaacctccacctccatgttggccaggctggtctcgaactcctgacctcaagtgatccacccgcttggcctcccaaagtgctaggattataggcatgagccactgtgtctggctggtggtcactctttctaggcaccaatccagaaccactgttatccgtgagccaaaaggggttatctcttctttatcttttataggagcaagaaagcttttcctagaagcactttgtagatctctttttggtgaaacccagtacatgtgctctatcatttgacaatgcattattatgctacaaatgatagaaaactggcttcttagggttttatttctctcacattaaagaaattcaaagaagaaatccctaagtaggcagcgttgggcttatatagagcaggtcaaatatgtcaccatagactcaggcttctagctgtctgatctgccattcttagcttatgggcttcatcctcaaggttgcaggatggctgctatgtctccatacatcaaatgtgtattccagtcaagataaacagaaagcagagggaatttctcctgggaagcttttgcctttgtgttctggaagtgatgcagtcctcaaagactactgactgtatatcgttggctagaaaggagtcacatggttgacactagatgcaagggaaccaggatcaagtgttttttttttccccccgaggcagtctcactctgtcgcccaggctggagtgcaatggcacgatctcggcttactgcaacctccacctcccacgttcaagggattttcctgcctcagcctcctgagtagctgggattacaggtgccccccaccacacccagctaatttttgtatttttagtagagacggtgtttcaccatgttggccaggctggtcccgaattccttacctcaagtgatccacccacctcggcctcccagagtgttgggattacaggtgtgagccaccgcgcccagcccgtgtttttgttttttttttagacagggtctcactctgtcaccaggctggagttcagtggcttcatctcagctcactgtaaccgccacctcctgggttcaagggattctcctgcctcagcctcttgagtagctgggattacgtgcatgcaccactacacctggctaatttttgtgcttttagtagagatggggtttcaccatgttggccaggctggtctcgaactcctgggctcaattgatctgcctgccttggcctcccagcatgttaggattacaggcatgagccaccacgcccggcctggatcaagtgttttaactaggtatgttgctattctgagcaaatcagggttcacttttttaggtagaaggagtgcatgatattgtgtaggcaaccaggacttacgtactatttatcaaagtatgattttcgagatgttaaaaacatacttctcatacaaatgaggcctgaaagtgagtcagaattttacttaactcattagtgaggaaacccaaaggaagacaaagcctgttcaacagaggccatggatagctatgcctaataactgtcaatgaaaaaaagagatactgaagtcagattgtcaaattacatacaaatctggttaatgtcctgcaagacaacaaaacctgtgacctttggggttatcttctctatctgacaaaaatcaattacgttggattagttttttacaaattaacaaattaacatttaactgtagagtcctagtcaatggaaagtagtcagaagtagccacatcctgtagagagtgtgatgactgtgggccggctataggcaggctccttagacagcagttctcaaagtcccaggccagcagcaccagcatcccctgaggatttctcgttagtgatgcacatattcagacccactaagtcagatttctcagggccagggagggggtgaaggggtggtggtgggggggggggcagtgggaggggtggcgggggcacagccctcagcaacctgtaattctgaggcctgctccagtttgagagccggtattccagtatgacattgaaagggtatacactgtcatcttttcactgtatttccaggtcttgaataatttttctaaatatacctatgccacacagagcctgagggaagggtaatagggccatcacgactggctgagaggagggaaccctctaatcaagttaaaacaaggggctgggcacagtggctcatgcctgtaatcccatcactttgggagcccaaggcgggtggatcacttgaggtcaggagttcgagaccagcctggccaatgtggtgaaaccccgtctctactaaaaatacaaaaattagctgggcatggtggtgtgcacctgtaatcccagctactggggaggctgaggcaggagaatcgcttgaacctgtgaagtggaggttgcagtgagccgagattgtaccactgcactccagcctgggcgatagagtgcgactcagtctcaaaaatgaatgaatgaatgaataaaaaccctgggatccagtagcagcaggggggcagagggagcagtggtcagatcatttaccatcagtgtccaaggccaatgccacaggccaggggctgcagtggaggaagctctcctgcctcctgtcacctgcccagcgtcttccctcaaggtgtacaagtgtgtggtcaaaagctgtgcccagacgttcccaaagctcgacacatttctggagcacatcaagagccaccaggaggagctgagctaccgctgccacctctgcggcaaggacttcccctcgctgtacgacctgggcgtgcaccagtactcccacagcctcctgccacagcacagccccaagaaggacaatgccgtctacaagtaagtgcctcctgcttccctctccctgggtggacgggtgggtgggcagggagcccagggcctgtggccttggtggttctgactgcttaggaccagtgagatatttgaaaggagaaaccgaggctcctggctggggtccagcctggcagagtgggttctgggctttggcactggtggaagaaaggatgctggctctccttatatcattcttatgtcttggcagacatttttcccaaaaaaaaatccttaaaaagaggaacctatatttccttgttcatagtgggaaaaggtttgagcattttattccaaactaaacaattatgacagtattattttgtctcataatctacaaaatttagcttacagtcaaagcggtacaccggttcttaacaattaaaaaagaatgggcagggtgtggcggcccacatctgtaaccccagtactttgggaggccaaggcagaaggaggccaggagtttgagaccagcctggcaacataatgagaccccatctctacaaaataaaatacattttaaaatgaacagttggctgggcgtggtggctcacacctgtaatcccagcactttgggaggctgaggcgggcagatgatgaggtcaggagatggagaccatcctggctaacacggtgaaaccccgtctctactaaaaatacaaaaaaaattagccgggcgtggtggtgggcgcctgtagtcccagctacttgggaggctgaggcaggagaatgacgtgaacccgggaggcagagcttgcagtgagctgagaccgtgtcactgcactccagcctgggcgacagagcaacactccgtctcaaaaaaaataaaatacaataaaatgaacggtaacatgtttaaaagcaaagatcataaaaataatattcatttgttttataatctataagatctaggttaaagttgaagctatatgctgattcctatttttattttatttttttctttgagatggggttttgctctgttgcccaggttggagtccagtggcaccatcacagctcactgcagcctccccgggctcaggtgatcctcccacctcagccacctgagtagctgggactaacaggcatgtgccccacgcccagctaatttttgtattttttgtagagacggggtttcgccatgttgctcaggctggtcttgaattcctggactcaagtgatcctcccaccttagcctcccaaaatgctaggattacaggcgtgagccactgtgcccagcctatatgatgattcttagaatgaacaagggatggatcaggtatggattttattggggtaatttattctgataatcatttatatcacttcagtcttccattgtggtcatgaagagggtccctttggcagaaatgatgaaaggtttcctcagttttgcaacatgctttttatccttagatcttcatgttaaagcagggcacagtggctcacgcctataatcctagcatttggggaggctgaggtgggaggatggcttgagcccaggagtttgaaaccagtctgggcaacatagcaagaccttgtctcaacaaaaatagaaaaattagccaggtgtgttggcacgcacccgtagtcccagctactcaggaggctgagatggtaggattgcttgagcccaggaggttaaggctgctgtgagccatcatcgcgccactgcactcagcctgagcgacagagacgcttgtcttaaaaaaaaaaaaaaaaaaaaaaaaagatcttcacgtcattctctttggacctattgacctctgatcatccttgttgagtttctctgcctcagttgttttctggtctgttttgccaggtcttcctttgttgatggtgttatttgcagttgtgcaacatcactttgatgatgtcatgaaatcccccatctgcagtcattttgctgtacatttgcctgcatcatctgggagcacctgcctcacaaaacccatgggggtagatagtagcaaaaggccaggagtggtgtttgtgtggggcctccttccagttcattagcaaatattttcccattacagtggtttttgcttctctgtacaaacttgtacctgcagagatttggtgtttctgttaatgaggcccctgtaactcctgggtgaagcttctggggttcagagataagtaaataccttgagcttaaaatgcatgggctgctcagggtgactggtgtgtaaacaaatgcaccctatcacttgataaaatgctatcatatatgtttataaggtatagagataccacaggggaggcaggctagagaagctgtcccaagagcagtgacatctgaactgagttttgaaggatgaataggagtttgccaggtagacaatggatggagtgtgttcctatcaggaggaaccgcaagtttaaaatacaacagcaagtgatgtattaatagaatgactgttatgtggagtggaagcgggagggagatgtttagatggggcctatgggaaaaagtggggccaaggcatgaagggccacgtagaaatcacaagagctctgagaagttggcagaggagctagaactcaagaaatggggtgtagggtaacttgcccccaagactctgggaaatggggcaagagaggcagggaagctgggcaaagctttggccagccaaggggcagagatttctggcagtgatgacttattcccgtttgcacttgataaattttctttggctcttgcccttctgatttgtggattatctgtgagttcctgtggctgtgtgactctggagtgagatgccaagtaaagggaaggaagcacctgctctgtgccaagctttgcctttagtgacatgaatccctgcagccctgggaggtaggtgatattctccccattttgaagatgaagacactgaggttcaaagagaagtgacctgcccaccagagtaacaacatcagcagagtttagattcgaaccctagtgtgagatcttggaagcctcatagccctggtcttggagtttgcaggttgaagattgagcccgatgctgatgaccctgtgcagtccccttgcagggtcatagtgccagtggccctttgtagacattggagctgttgtcctgtcccaaaagtaaggcccaatgagccaggcccccatttggatggcctgaaggtggaatggtgtcatgggtagtgataagggttctggagccattggcctgtgcttaaatcctgtcttgactgcaaatccagtggatgaccttgggcaaggtattcagccactctgagcctcggttttctcctctgtgaaatggggatcacagtagtgcctgccctactggattatttataaggatcaagtaagacaaggctgaggctcttagacatggtacctggaacatagtaggtactcaataaatgttattgctacaattattattatttgtgttatttaagtagaagtttggctgcatgcagtagaaacctcaaataacagtgacttatacaccatgagagttgattctgtctcatagtgacatttgagtggctgtggtggcttcatcatatctttagaagtccaagccctgtcattctggtttctgttccctgtcagccacattgccttggcctgcctatgtgtactttccccaaacctctcaaatgacttttagtcatgccactatatctttactgtatgtttaatatttccttttaaaaaataagatttggctgggtgcagtggctcactcttgtaatcccagcactttgggagtccgaggagggcagatcacttgaggtcaggagtttgagaccagcctggccaacacagtgaaaccctgtctctactaaaaaaaaaaaaaaaaaaaaaaaaattagctgggtgtggtggcacactcctgtagtcccagccactccggagcctgaggcaggagaatcgctcaaactcgggaggtggaggttgcagtgagccaagattgtgccactgcactccatccagcctgggtgacagagagagagactccgtctcaaaaaagaaaaaagagaaaaataagatttattgattttttcccccaattgcaaaagtcaatgttcaatgcagagaaaacaattttgtaaaaacccacacaaaaacaaaaaaccaaaactgtcacccagagatcgccactgcactattaacctcttggtggatatcctttggcatatatgtgtaataaatatgtttacagatatggatacagatataaatatcacagactatatttgagtcaggtgatgccaaatagagtcactgaatttggtgaaaattcatcacactgtcttcctgtagcgcaatgtccaacaaacagactgatttaatgggatcactgcacatgtggttttatcacttaaaactttttcacttaaaacagtaatatagctgggcatggtggcttatgcctgtaatcctagcactgtgggaggccgaggcaggcagatcacttgaggccaggagttcaaaaccagcctgagcaacatgatgaaaccttgcctgtacaaaaaatacaaaaattagccaggcatggtggcatgtgcctgtagtcccagttacttgggaggctgagctggattgcttgagtccaggagttcaaggctgcagtgagccgtgatcatgccactgcactcgtgagaccctgtctcggggaaaaacaaaaacatcagtaatatggacatctttgcatttcagcaacaatagacctgcctcattctttaaacagctactttgtattccattgtgcatggtgtactgtgatttacttctgtcatctcccattgttggttagtgaggttattttcagtttgtcatcagtataacaattatacagggaacaacttcggaagtacatctttgctcttttctaagttcctagaagtgattttgcaggtcagagttgaaagggttttgtttttttttttttttgagatggagtctcgctctgttgcccaggctggagtgcaatggcaggatctcagctcactacaaccttcgcctcccaggttcaagtgattctcctgcctcagcctttctagtagctgcgactacaaggcacctgccaccatgccccgctaattttttgtatttttagtagagacggggtttcaccatgttagccaggatggtctcgatccctgacctcgtgatctacccacctcggcctcccaaagtgctaggattacaggtgtgagccaccgtgcccggccttttttttttttttttaaagattaattatctacttcaaaaactatatgtatacagtgcaatattgtaaaactatcacaggacatagagtgaacaggaattctccatccactgtgacccacttccccatatcacgggcaatcatgttcgaaaagtgttctttgtaaacctcttattttgtcataattttattattgattgattgatttttgagacaggatcttgctcagtcacccaggctggagtacagtggcacaatcatggcttgctgtagccttgacttccctggctcaaacaatccatccccctcagcctcctgagtagctgggactacaggtgtgtgccaccactgccagctaattttggtattttttgtagagacagggtcttgctatattgcccaggctggcctagaactccaaggctcaagcaatccaccctcctcagcctcccaaagtactaggattacaggcataagccaccatgcctggccttcaatatatgtgttttaaagctttcctttgtttcatgaatttaacttatgtatgtattttaattttaatataattaattaattaattttttgtttagagacagggtctcactccatcaccaaggctggaaagcagtggcatgatcatggctcactgcagccttgacccttgacctccccagtctcaggtgattctcccacctcagcctcctgggtagctgggactacaagcatgcaccaccatgcccatctgatttttttttttaaactttttgtagaaacagggtttcgccatattgctcaggcttgtctcaaattcctgggctcaagtgatcctcctaccttggcctcccaaagtgctgggattacaggcatgagccactgcacctggcctttttttttttttgagacaggatctcactctgtcacccaggctagagcacagtagcatgatcacagctcactgcagccttcgcctccggggctcaagcaatcctccagctcagcctcctgagtagctgggaccacaggtgtgtgccaccaggcctggctaattttttattttttataaagatggaatttcaccatgttgaccagactggtctggaactcctgggctcaagcggtccacctgccttgttctcccaaaggtctgggattataggcgtgagccacacacctggccaatttttatttttttagagacagagtctcactgtgttgtccagtctagagtgcatcagctattcacaggtgtggtcgccttgcctcagcctccccagtagctaggactacaggcaggcgccatcactcctaggtaaatttgtttgtttgtttgtttgtagagacagggtcttactgtgttgcccaggctggtcttgaactcctggcctcaagtgatcctcctgcctggccttcccaaagtgctgggattacaggcgtaagccatcacacctggcctgtatttcctaaaaacaaggataacctcttccataagggcaatatactatagttaccaaaatcaggaagttgggctctgtgcggtggctcatgcctgtaatcccagcactttgggaggctgaggtagacagattgcttgagcccagaagtttgagaccaacctggactacgtggcaaaaccccgtctttaccaaaaaaaaaaaaaaaaaaaaaaagaggtgggtatggtagcatatgcctgtggtctcagctgctcaggaggctgaggcagaagaattgctttagcccgggaggtacaggttgcagtgagctgagatcgcaccactgcactcccgcctgaaggacagagtgagaccctatctcaaaaaaaaaaaaaaaaaaaaaaaaaaatcaggccaggtgcggtggctcacacctgtaatcccaacactttgggaggctgaggtgggcggatcacctgaagtcaggagttcgagaccagcctggccaacatggcgaaatgccgtatctactaaattataaaaattagctgggtgtggtggcgggcacctgtattcccagttacttgggaggctgaggcaggagaatcccttgaacctgggagacggaagttgcagtgagccgagatcgggccactgcactccagcctgggtgacagagcgagactcttgtctcaaaaaaaaaaaaaaagaagaaaaagaaatcaggaagttaatatcagtacaattctattatctaattacaggccttactcagaattttccaattgttccaataacatgctttagagaaaaagaaaaaaaaggtttttttgaaccagaatcacatgttgaattcagttgtcatgtctctctcgtctctcttgtgtcctataagctggaacagttcctccttctgtctttgtcttcgagaccttgatatttctgaagagtatagacaggttattctgtagaatgtcctcagtttgggtttgcctgattttaccctatgattaaattcaggtcatgcacttttgtcaggaatgtcacaacaaatactgtgtcctcctccgtgtgtcatatcaggaggcatgtgatgttgatttgctctattactggtgatgttaccttggatgacttaattcaggtgctgtttctggcaggagattttaattttcctggctattggtaaacaatctctgacacaaatctatgtctcccccaaacccagcccctgaagcatgtgagattctgtcctttcccatctcaccagctagttaagtctctgccctcctggtacctctgctcccaccccaccttccctttcttgctgcctggaggcatttagtatgtggcttctttctttttcttttctttttttattttttttgagacagagtctctctccgtcacccaggctgaagtgcagtggcatgatcttggctcaccgcaacctctgccctcctgggttcaagtgattcttgtgcctcagcctcctgagtagctgggattacaggtgtgagccaccacacctggctaatttttgtatttttagtaaagacggcatttctccatgttggccaggttggtctcgaactcctgaccttaagtgatccgcccacctcggcctcccaaagtgctgggattacaggcatgagccaccgcgcctggctagtgtgtggtttcagagtgcgcctggctagtgtgtagtttcagagtgcggtctatggggctcccctgggcccttcgcaggtgcagcctgcctggggtttcccacaggcagtactctacacagcctgccttttggtttttgctttgaattgttcacctacctgtgacattcctcactgataactcattgtaaataggtcaatatgctggcaaatgttttcttttttcttttctttttttgtctgataataccctttcttccttagctggcacatgttttcatgatggggagatggtggtgtcttttctcccttcagagtggttggtggcctgagactgctgttgtgaggacatgtttatgagctgtttggcacagttgtgttttttgactctgtattaggccattcttgcactgctataaagaaatacctgagactgggtaatttataagaaaagaggcttatttgactcacggttcagcaggctgtacaggaagcatagtgtctgagctagcagatctgccactggggaggcctcaggaggcttttactcatggcaggaggagaaggggaagtagacatgtcacatggccagagcaggagccagatagagagagagggaggcgccatacacttttaaacagctagatctcatgagaactcactcactatcctgaggactgcaccaaggggatggtcctaaaccattcatgagaaatccacccccatgatccaatcacctcccaccagaactcacctccagcactggggattatagttcaacatgagatttaggtggggacacagatacaaactatgtcagactctgtgacaatctcccttttttttttttttttttttgagatggagtctcactgtgtcgcccaggctggagtgcagtagcgtgatctcagctcactgcatcctgcatctcccaggttcaagtgattctcctgcctcagcctcctgagtagctggggttacaggcaggtgccaccacgcctggctaatgtttgtatttttagtagagacagggtttcaccgtattggccaggctggtcttgaactcctgacctcaggtgatctgcccacctcagcctcccaaagtgctgggattacaggcatgaggcactgcatccagccatgtgacaattgtaagaatgagtgacaggcaggtctgtttgggactcacaccccatattttgaatgaggaggcccagcaggtcagaaatgggaaggcgctgggcttggatccccatctgtctgactctttaatgtaacaagttctcactggtgctgggagcagcttgtgaatgggcaagatgtggtatctggaacagggaccacttgctagtggaggagacagacaataaccaagtaagcaaataataaataattccaggtaagaagtggtaagaagaaaataaaactgagtgatgtaatagggagtgactgggagtgcatcgtggggggcaacttgagacagggtggccaggagggcctctttggggaggtgacatttgagctgagatatgaaggatgagaaggcactgcctggggaagacttggggaagagtgttccggggaacaggaacagccagtgccaaggccctgaggtgggaatgagcctggtgtgttcaaggtaggtcaaggaggccagggtggccagagcagagtgagtgaggtggagaaaggagaaggatgaggtctgagaggtgggagtgggtcagaccacagggccttgtaggccaaggtgggaggtgggttaagcaatggtgtggcatggtctgacttactttttttttttgtttcttttttgagacagagtctcactctgccgcccaggctggagtgcagtggtgcgatctcggctcactgcaacctccgcctcctgggtttaagtgattctcctgactcagtctcctgagtagctgggattacaggtccacgctaccacgcctggctaatttttgtatttttagtagagagacggggtttcatcatgttggccaggctggtctcaaactcctgacctcaggtgatgcgcctgcctcggcctcccgaagtactgggattacaggtgtgagtcaccacaccaggcctttttttttttttcttatttaaatagagacaggttctctttctgttacccaggctggagtgtagtggcataatcatggctcactgtaacttcaaaacccctgggcttaagcgatcctcctgccttagcctcttgagtagctgggaagccaccacatctagctaatttttaaatttttcatagggataggggtcttgccatgttgcccaggctgattttgaactcctggtctcaaacaatcctctcaccttggcctcctaaagtattgggattgcaggtgtgagccagccactgtgctcagcctgtttcatttttaaaggtgcccctggccaccctgtggagaatggactacaggaggcaaggcaggggcagggtggccagcgaggaggctactgcacaagtccgaacaagagatgatggcgctcagatgaggacaggcagtggcaattgagaagagtggatggatttggaatgaattaactgtaggatgttgcctcctaatgttggccctggggtggccggggcgctgcttcctatgcctgctgtgtttcctccctcatctctcctgctccttccacttaggtgtgtcaaatgtgtcaacaaatactccacccctgaggccctggagcaccacctgcagaccgccactcacaacttcccctgcccacactgccagaaggtgggtgccactgtcctcttttctggggcctaggctataataagggcaaggaggtggggtggggtgcacacctcaccctttccttctcctctctcaccataggacacgcaggcagggctcaggggctgctccacagatgacacagtgtctctgcctggccatctcatccatcacattccagatgtggccatgtcggggctgctgctggagccaggctgggtgggctgtcctggtcccaggcctagtgtctgagcagaagcctcccagcttcctgatgtaagattatccttattacaattggctcttctttttaatttttttttttttttgagacagggtcttactctgtcaccaggctagtgtgcagtggtttgatcatggctcaccgcagcctcaacctcctgggctcagccccctgagtagctgggactataggcatgtgccaccatgcccagctaatttttgtattttttatagagatggagtttcaccgtgttgcccaggctggtctcaaactcctgggcttaagggacctgtccaccttgacctcccaaagtgctgggattacacgcatgagccactgcacccagcctaaattttttgtagagatagggctcactatgttacccaggctggtctcaaactcttggcctcaagtgatcctcccacctcagactcccagagtgttgggattacaggtatgagccatcatgcccagcctggattcttcttttcagtgactctgaaagcctcactaaagcctgttcctgataacatcaaacatccaggaagtgttccaatttctagttgtctcaaagcttcatcattttgtaaagttcatttgaatcaggtccatagattgcaattgattgacataacaaaagcctctattaatctacaggtccccaccaccacccctgaccactgctcccttttttctttcctctgaatttatttgttgaagaaactgggccatttggttcagcggtgttccccgcagtctggattttgctgattacgtctccctggtgtgtttaacttgcttcttcactctactcattttcttacaaccatatgtggcagattttccaggacagccctggtttcattttggcctcattctggatgtttcttattatctaacctaattttaagctttagaagttgtggtccgagtaaaagataccatgaattgagcaagaaccacatgccagatgctgttctgagcatttcactggaattgactagaggataggtgtactgttactatccccctttataggtggggaaaccaaggcagaaaggtcacctagctgggaaacgatggggctaataagcagtggggcagctgggtctgtgcccgtgaccaacgctctaccaaaatgaatgaatgtgtgaatacatgcccttcttttgcctggactggaaagagattttcacttctgtgttttctggctttaaaaaaattacctttcatacaaaaattagctgggtgtggtggtgggcgcctgtaatcccagcacttcgggaggctgaggcgggtggatcacctgaggtcaggagttagagaccagcctaaccaacatggagaaaccctgtctctactaaaaataaaaattagccgggagtggtggcaggcacctgtaatcccagctactcaggaggctgaggcaggagaatcgcttgaacctgggaggcagaggttgcagtgagccaagattgcaccattgcactccagcctggacaatatgagcgaaactgcatctcaaataaaataaaataaaataaataaaagtaaaaaattacctttccatagatttctttagtaatttgctcattttccattaattcttttacttgtcagtcatttgacccaggctctgtgctggggagtgaaagcccctctctgcctacttggagctcctgtgtaagcaaagggctgtcattcagtgggttaaatgctgacttaaaagtgtgggtggacattcaaaggcagaattggctttgccaggcatagcaccagggagctagggaaggcttgacaggagcagtgacgcccgagttgggtcttgaaggatgtgtaagagtttgtcagtaaagagagaaaggccctctgggtgggaagaacatccgggcaaaagctcagggcagacatgttttgtccgggcttgtggggagccatgaagttctaagggctgagtctgacattctgggtcctggcccctgatagccagaaaggaaggtgtctctataggggctggaaacgaggaacctttgagttcagaagatggccaggggaggggggcccggtgagtcagacctgaaggcccctcttctctcccaggtgtttccttgtgaacgctacctgcggcgtcatctgcccacccacggcagcgggggcaggttcaagtgccaagtgtgcaagaagttcttccggcgggagcattatctcaaactgcatgctcacatccactcgggtaggtaccctgcccctgagaactccagcccagcccctcccctccccctccccctctcctcatgcctttctctctcttcccatccccatctggctcttctccctgtctccctcagccccttttccctccacttctccatctccctccccatctcactcagtccctcccctcatctctctcagcccccgtctccctcctcctccccatctccctcctcctccccatctccttcctcctccccatctccctccagcacccttctccctcctcttccccatttcctttcccctctccctctccctactcctctccctcccccctccctccgcctcctcacctccctccctctccccatctccttccccctcccccatctccctccctctctccatctctctcccccccatctccctcaccctccccatctccctcttcttccccatctccctgcagcccccttctccctcctccttcccatctccctctagcctcccttcccctccctctccccatctccttctagccccctccagcctccctcccctgtcctctcccctctccctccagccccctccccctcctctctgtcgctgtctgtctccctccagccctcctgcctctccccttgctcctccttcctctctccttcctggcccctgatccacctgccttaattcatgaacaagggattcccaccaccgctaaagcagagaagagcccctggaggttgtgtggaagggactttttattctttttttttttttctttgagacaaagtctcgctcttgttgcccaggctggagtgcggtggcagatcttggctcactgcaacctctgcctcccgggttcaagtgattctcctgcctcagcctcctgagtagctgggattacaggctcccaccaccatgtccagctagttttttgtatttttagtagaaacagggttttgccatgttggccaggctggtttcgaactcctgacctcaggtgatcctcctgcctcggcctcccaaagtgctgggatgacaggcgtgaggcactgcacccagcctgtgtgagggactcttgactctgccccctgtggtggggacactgctctcactgtaagttcccactcaaacctgaacaaaacgccatctccttggttccccagttgaaacacactgacattttcttttctattaatctttagatttttttattagttaaattttttaattgctttttaattgaaaaggatctaaagattgagaaaacttgagggaaaatccttgacgggacaaaagcatatataaaaaaataaactccctctcacttcagatggacaatccaatgtttttccttttttttctttcctacgacctatggtaaaaaatacatttcatattgcaacccaggaagcacacataggatgtattgcaacaaaagttttacaaaacagtgttttctattttgtccttttcaattttagtttttttattttttatttttattttgagacagggtctcactctgtcacccaggctggagtgcaatggtatgatctcactacaacctccgcctcccaggttcaagccattctcgtgcctcagcctcccgagtagctgggattacaggcgcccaccacatgcctggctaatttctgtattttcagtagagacggggtttcaccatgttggccaagatggtctcaaactcctggcctcaggttacccacccaccttggcctctcaaagtgctgggattacagatgcaagccaccacacccagcctatttttaattcttaaaataaccaccaacagggtgtaacttgtggtttgcagtttgcaaaatactcctaattctcttccccaaaggtaactgttagcggtctagtctgcattcttctagttttattttacacatatataaaacgcttgcttacgtttgcaaaaatgagcacatactataacttatgtgcctttttttccttatcatataccttggcgatgttccccaaggaatgtgtgcttacagttcccctggaggctaaattctgtgggtccccctcccccgggccccccccagaagttgttaccaacagcaccttctttttcacatctgagtagtcttcctcaatgaatttttcatcttgtatttagccagttctctatgtatgaaccttttttttttttttttttttttttgagactgaatggcacgatcttggttcactgcaacctctgccgcctgagttcaagcaattctcctgccttagccttccaagtagctgggattacaggtgtgcaccatcacgcccagctaatttttgtatttttagtagatatgtggtttcaccatgttggccaggctggtctcgaactcctgacctcaagtgatccccccgccccagcctcccaaagtgctgggattacaggcatgagccatcacgcccagcctatgtatgaaccgttaaattacatttcagctattagtttgtacacacaatgctgtgtgggtcccttggcaagcttttggaagtgtatctgtagtgtatattcttaggagtggaaatgctaggttaaaatgcatgtgtaatactgagtttcagtttgggatgatgaaaaaattctagagacagatgatggtgatggttgcatgatggtgcaaatgtacttatgccactgaactatacacttaaaagaagcttaagatggtcaattttctgttatgtatatttctccacaataaagaagggaaaagaagtaatgcattgtaagtttgatattaccaaattgctctttatggcttttaaaaattattattcaaaagtaatacatgctgccaggcgcggtggctcatgcctgtaatctcagcactttggaaggtgaaggtgggtggagcacctaggtcaagagtttgagaccagcctggccaacgtgatgaaaccccgtctctactaaaaatacaaaaattagccgggtgtggtggtacgcacctgtgatcccagctactcaggaggctgaggcaggagaattgcctgaacccaggagatggaggttgcagtgagccaagatcaaaccactgcactccagcctgggcaacagagcaagactctgtttcaaaaaaaaaaaaaaaaatacaaaaaacgaaacaaaacaaaacaaaaaaaaccacacaaataatacatggttattataaaaatggaaacaatataggagtacataaagtaaaatgttaaatttccccttcaagttgtagttgccactgacactttggtctgtcctttccctacacctccccatctttcttcctgcatcttcagtttatttacagagacacatggccagggcttttttggggtgtgcaggttgtattttttctttcttttttttttgttggagcttacatatccagtagggattatatttttttctaagaaagacgagattgtgttaagctgttctactgctttctttccccactagcagtatgtccaggagatctttccagatcaggaaacacagattgacctttttaatctttttaatgaccacagagcattctattgtagggaccagcatttccgtatcgactgggttgatggtttttcagaagtactttattcattccagagggagaacagagaggaaataatggcaggaagtcacagcagcccagaaacagccccttccaaagggcaggctgtgaccccacggcaactttgcaggcacctcccttgatttcctgtgggttcctcaggtagcccatcaggcaagagctgccccaggacgggtttaacagcaggaagatctgggtagctcagatgggctctggatcacgctgctgggctggaatcttagctcccgcaaccataggggtagcccctgagccagtcccttcacctctctgaacttcagtcttctttcttatctgtgaaacagggatgatgggagtcagtgcctcctggttttttggaaggattcagttagataaggtgtgattcctcgtcccccagggtggaccgcattgccagaaatgacatgaggccaccttgcttctcaggccgtgcctcatccttgactcctctcctcctctcacagtcacagccagtccagtggcaagggctgccgactgtgccttcccaacatggctgtcctgggccacttcctggttatcctcacctccaccctcattcgagctggttaaaagcttacatcagagtccatccctctgctgttcagaccttctggtgcttctcttctggctcagagtaaaagccaaagtcctggctgggcgcggtggctcatgcctgtaatcccagcactttgggaggccaaggcaggtggatcacttgaggtcaggagttcgagaccagcctggccaacatggtgaaaccccccatctctactaaaaatacaaaaattagctgggcgtggtggcacacacctgtaatcccatctactcaggaggctgaggtaggaggattgcttgaacccagaaggcagaggttgcagtgactcacctgaaatcttgccactgcactccagcctgggtgacagagcaaggctctgtctcaaaaaaaataaataaataaaagccaagtccttagctctgcctcccaggtcctcccatgcggacctggctggctcgctgccctcaccttctgccttgttctctggccacaccagcctccctgttgttcatcagcaccgccaaacgcactcctgcctcagggcctttgtacctgctttccctgctgcccagaccatctccctgatgacctgaggtctctcctcatgcatggcctcatcagagaggcctctcctgaccatcctgtcaaaatagccctgtcttgtctctggcaaaacaaagccactgaagaatgagagaggctattttctcccctggccacctccctagaggagctgctcccctgaggggcccagcggggacccttgtgccctggatgccgactcctggtgagtgctggctctccctgtctgtgtctgctgcaggtgagaagccctacaaatgctcagtgtgcgagtctgcgttcaaccgcaaggacaaactgaagagacacatgttgatccacgagcccttcaagaaatacaaatgccctttctcgtgagtagagactgccatgcaggggggtgggtagcgggacagattctccaggggtgctgctggggagggtgggacagatgtcaggcctgagggcaggcctctccttttttttttttttggagacatagtctcactctgtcatccaggctggagtgcagtggtaagatcttgtctcactgcaacctctgccttctgggttcaagcgattctcttgcctcggcttcccaagtagctgagattacagatttagtagagatggagtttcgccatgttgcctaggctggtctcgagctcctgaccgcaagtgatccatccacctcggcctcccaaagtgctgagattacaggcgtgagccactgtgcctggccaggcctctctccttttatcctgtcctgggccctgcctgcctcacttcccaccctacctccttgcccagcccttagggtggacaaggctgtcccttgtgcccagggctagtggaggggccagcaagaggatcctaagcttggtgagctccccctgaccagtggctttgggttttaggacgcacacaggctgcagtaaggagttcaaccggccggacaagctgaaggcccacatcctctcccactctggtaagtggctcttgggcctgctaagagggtctggttcagctctagttcactgggatagacccgccaggaagagaaagagcagacatatcctgtgaggcttgttttccctgcctggcacattccagccagcactttcacttatgtgggctatgagccaggcctgtgttagggacttaagggtgaacagagatgaatcagacacagtcccccagtccaaggaggaagctgacctgagcagagatgactcagttggagcagtgcccagtgtaatagaggtgtggacgaggtgtggagggaatcagattccagccaggtccaagacatggccaggaagcttctttgatagggcagggcaggggtctccaagccactcctcagtttctcagcgcctcctcagagcagcctggctggctttccacatgccagccgaggtctaaaacaaggttcttcaaccctggcaccattgacaatttgggccagataattttttttttttttttttgagacggagcctccctctgtcacccaggtggagtgcagtggtgtgatcttggctcattgcaacctctgcctcccaggttcaagcgattctcttgcctcagcttcccaagtagttgggattacaggtgcctgccaccacacccagctaatttttgtatttttagtagacatggggttttcaccatgttggctaggctggtgtcgaactcctgacctcaagtgatctgcccgccttggcctcccaaggtgctgggattacaggtgtgagccaccggcgcctggcctgtaatcctgtagataattttgtcctgggggctgtcctgtgccctgtaggatttttagcagtatccctggcttctatctactggtgtcagtggcatccccccacagttgtgacaaccaaaaatgtctctaggcattgctgagtcctctggggggtaaagtctcccttgtttgagaaggtttacagaaaggagtcagtcactaaagaaagtgtgaaaactgggagagtaggtcaatgacttggacacacagggctgggttggagtcttagtgctgccatgttcctgtgggtggcctcaggcgtcacggcccctccctgagcctgagatgacctggcaaagcgagccaaggtgcagagagtgagcagctgttccaggcagaggagaatggcaagtacaaaggcgcagagggaggagccagcgtggcatctctgaggagagcgagtgtggctggcgcagagagtggctggaagaaggcagacgacgagggtggagagagctggggccagatcacacaggtgctggtggggaaagagcctggattttattcccagcgcagggcactgttgcggggtgaaggtctggatgcttctcactgactttcccttgccctccaggcatgaagctccacaaatgcgccctgtgcagcaagtccttcagccgccgtgcccacctcgccgagcatcagcgcgcccacacgggcaactacaagttccgctgtgctggctgcgccaagggcttttcccgccacaaatacctcaaagatcaccgctgtcgtctcggcccccaaaaggacaaggacctgcaaacccggcggcccccccagaggagggcagccccccgcagttgcggcagtggtgggcgcaaggtgctgacccccttgcctgacccgctggggctggaggagctgaaggacacaggggctgggctggtgcccgaggctgtccccggcaagccgcccttcgcagagccggacgcggtgctgtccatcgttgtgggtggtgcggtgggcgcggaaactgagctggtggtacctggacacgctgaggggctgggctccaacctggctctggcggagctgcaggctggggccgagggcccatgtgccatgctcgctgtgcccgtctacatccaggcctccgagtgacggacctgaggtgtctgtttcctgggcaggcctgatgctcctgtttgggtccagggcccctgggggcagaccggtgatccttaccagtggaagcgagccatcgagccattggcagaaatcctgctgaatgtcattcagaaacctcagcccatggtcgccctcctgtgcccctctcctgccggaaagccctgcaacattctagggttgggggcagggccatccacggtttctgggcagagccatggtggcaggagagagatggctgaagcctgagcagcccagagtcccgctggtctaggctggtggtcggggcccctgggagaggagacagggcattcctccccactctgtctccaggctgcctctgggtagcctctagtctgctgttcttcaggaggcctgccataaactcttcggagtttacgtgttgcaccttttcacagacggttccccacagcatcctcagacagctctgtgatgtagcttttaggaggcactcaggtgtcacggctagactgcagctatgagacagatctggcttcaaatccaagagttgccatgcacttgctgtgtgaccttgggcaagtcacttcacttctctgagccccgtgttcctcatctgtacaatggggcttacgatactactacctcatagggttgtcctggggatccagtatgatgaagtgcgccaggggcttggcatggtgcccggcacgcagaaagtgctcaataaatgtttttgtcataacgtgtccgggtggcctgggccaagctgtggcagtttccttctttgcccctaggtggcagcactccccctctgaagcttgtggtggctgaggggtcccaggcccctcacacagggagccctggagagatgataagggaagcaaggctgggcacggcagctcatgcctgtaatcccagcactttgggaggccaaggtgggctgatcacctgagatcaggagtttgagaccagtctggccaacatggcaaaacctcgtctctagtaaaaatacaaaaattaaccgggtgtggtggtgcacacctgtattcccagctacttgggaggctgaggcgggagaatcacttgaacccaggagacagaggttgcagtgagctgagatcgtgccactgcactccagtgtgggagacagagtgagaccctgtctcaaaaaaaaaaaaaaaaaattagctgggcatggtggtgggtgcctgcagtcccagatatgctggaggctaatgtgggaggatcacttgagcccaggaggttgaggctgcagtgagctgagattgtgccactgcattccagcctgggcaactgagcaagaccctgtctcaaagatttaaaaaaaaagaaaagaaacgaaaaaaaagaaaggaaattgggaacacccatccacagaaaacagtccaggacaacaccccatgggggtcggggtttgtactcacttgtgggaattcaggatagttagccacctccaaatccgttgtaaacaagatcagaaatccctctcgtgtcggcatctggaggccatcaatgtcaccgcgtccagtgcttcctcctacctctcagctggtcccggtgggaggtggaccgggctcatgaggaggcgggaaggagaaaagggccttgactagtgttttcctgtttatcttcacagccacccttctgggctgttggactccatttgatgactgaattgttttgaaggctggcaggtccctcaggcatctgtgttggatctcagggctggaactcagagccaggcccagcttcccacatcctcaggaagggtgtgacgcggcaggagggacagagttgatgggggtgaggtgtgtaagtgtaccggcctgcacaaaggcccgagggggactggtggggacaggaagtcagaggggatgcccctggagctgggccttggcccggggtgctttgatgggtggatggataggggaaggtgtgctgggtgagagcagggcgcgtgcaaacaccttggggtgggacagtgccaggcctgctatgttctggggccggcggatgttccagggtgaccagaggtctcagaggagtaggtggataatgatcatggctgttgcttcaccttctccacacgagggacactgtgccaggctatttacagtcacgtcgcctcagcctgtcatgtgagtgctgttactttctgtattttacagctgagaaaacccaggcccagaggggtaaacttccttacccaagctcacacagccaggaaagctgcagagctgggactcaagccacggcagcctgcctccatgggttcttagccactttccacgattgaagtgtgggttgatgaatcagagagggccttagatgtgggttaaggaatctggactttattctccacataatgaaggggagtcatgggagacagtgaacatttttaaaagttgtaacaatggcattgaaagaaatgtgaagaacgacatcttcagccgggtgtggtggctcactcctataatcccagcactttgggaggccgaggcgggtggatcacccgatgtcaggagtttgagactatcctggccaacatggtgaaaccccatctctactaataatacaaaaaaattagctgggcgtggtggcacatgccagtaatctcagctacttgggaggctgaggcaggagaatcgcttgaacccgggaggcagagtttgcagtgagctgagatcccgtgacattgcactccaatctgggtgacaagagtgaaactccatctcaaaaaaagaaaaaaaaatgacatcttcttcctaatataactatttaagtggtttttctatagcttcttcctgtcagtgcacacaggcatacacgtctactggtaatcacgagaactaacatttattagttatcgaatgaatgcctggcaccatccccagcacctcaatgtaggcactacttttaagcccattttgcagctgagatgaggcaacaggcacattaaggttaagcagcccaaagtcacacaggagggaagtagcagagccaagccacagataaggacataccaagatcagctataatgtttaacagaaagttggtgacaaatcccagcactttgagaggccgaggcaggcagatcacgaggacaggatatcaagaccatcctggctaacatggtgaaaccctgtctctactaaaaatacaaaaaattagccagatgtggtggccctggagctggtcccagctacttgggaggctgaggcaggagaatcgcttgaacctgggaggcggaggttgcagtgagccgagatcatgccactgctctccagcttgggggagagcaagactctgtctcattaaataaataaataaataaataaataaataaataaataataaaaaagaaagttggagatagctgctccaggaccccagggtctgccaccgaactccaagatgctggacagagtggagcataaaaaggggctggcctaggcatccagggtctcactccacccccagaaagatcacagtttttttaccgggtgtggtggctcactcctgtaatcccagcactttgggaggccaagatgggcggatcacctgaggtcaggggttcgagaccagcttggccaacatggcgaaaccccatctctactacaaaaaattagccattcgtggttgcatgtgcctgtgatcccagctacttgggaagccaaggcaggagaatttgtagaatccgggagacggaggttgcagtgagccgagatctcaccattgcactgcagccagggtgacagagtaaactcatggacagactcttactctaagagtaaactctgtctcaaaaaaaaaaaaaaaaaaaaagagaaagattacagtctttggtatcaagcagagctgggtttgaattctggctctgccccctcctagctgtgtgactatggcgagtcacttcacctttctgaacctcagtttccttgtgtcagtgtggagaataatagtacctacctggcgaggttgatgtcacaattcacggaaataattcaggtaaagcagagatcacaaattggccgctcatggcagcctccagacagtttggcattcacagtgtctgaaaaagtaagccaacgtttaaaaacaaatttaaaatatactacagtggtgaagtgtcaggaatgacacaaggatgcctgctgttatgactccaatattacattagtggcctggccagaataatagagcaagaaaaagaaataaatagtatcaggattggaaagggtgagataatagcaagggtgctgaaataatagcaagatcaatatatacaaatctactatgctcctatactccagaagcaattagaaaatgtaaaaaattgggacatttgggccaggcgtggtggcttacacctgtaatcccagaactctggcaggctgaggtgggtggatcatgaggtcaggagattgagaccaacctggccaacgtggcaaaaccctgtctctactaaaaaatacaaaaaattagccgagcatggtggtgcgtgcctgtaatcccagctactcaggaggctgaggctggagaatcacttgaactggggaggtgaaggttgcagtgagctgagatcatgccactgcactccagcctgggcaacggagtgagactctgtctcaaaataaataaataaatatataaataaacaaaaaaactcatttcctctgataagttttccttggccaatctgtgtaacatagccccacctccatcattctcgaattccttaccctattttatttttatacgtcacccttgacattatattagacatttgtttattgtctgttgtcctcattagaaacaaaaggtccacaaaggcatcgacttttgtctgttttgttcctgaagtatctacagtgcttagaccttcccaggaattgttcaatcaatatttgtcgaatgaataaacaacagcactttgagagaagaaggctcactttacccacccgctcctctcaccccagggagaccagagaatctgtcatgtagaccgagatatgactgacccagggtcctgggaagtaatgtctgatataaaaggatatcttcctttgttcaaagagggagcagagaatatctgggccaaatgactaaggcaggtggcttggaagtctcgacagagcaggtggaagtcgacagagcaggtgtccctgtggcccagggaactggttggactagttttgtctcctttggggaggaaggagtggaggtggcagctacgggtgctcccaacccccaaggctgccagcaagtgacccccccacacacaaggctttcagggcctgaagggtggtgatcagggaggtgagcaggctccatctaaggattggcagtgacttcttactagctgagggtgcctcaggtaggcttaggcacagaacccaactttagggccttgcgtcctttgaagaatcacagagaataaacaggcccagggagagaaaaggtcttgtccaaagtctcatcaaggcaaggctgcttcccaggccactgctacctcagtccacttatttattgattaaatatttcttgagtacctatgacgtgccaagcatagttctttgatgatacatcatgagcaaaacaatcatttgtggagatcctttgtggaggaagcagaagataaacaacaaagtaaataagtaagttatagatgttaggaggtgacgaggactatagagaaggaaaaaaagtagaggtgagtagaggttttgagagtttggagggtgctggtgtgtttgaggaagagtagaggggccagtgtgattggagtgaggcactggaaagggggagggcaaggaggtgacaggaaaatcatgacatcatgtagggacttgagggacattgaaaggactttgggttttacttgagggacgtggagagccattggaggattgtgagcattcagtgactggatccgacatacatatgtatgtccagtgtcaaaacatatatatgtgtgtgtgtgtacatatatgtatatatatatgtgtgtgtatatatatatgtcagatgtcaaaaaaatatatatatataattttttttttcctgagacagagtctctctctgtcacccaggctggagtgcagtggcgtgatctcagctcactgcaacctccaactcccagattcaagcgattctcgtgcccctgcctcctgagactacaggtgcatgccaccatgcccagctaatttttgtatttttagtaaagatagggtttcaccatgttacccaggctggtcttgaactcctggcctcaagtgatccgcctgcctcggcctcccaaaatgctgggattatagggatgagccactgtgcccagccaaacacatattttttaaaggatacctctgcttaccatgtagagaatgagctggaaggaataaagatggagacaggaaggccaatgaggaagagtattaggttcctcttgcttctgtaataaagaatcagaaacttagtggcttaaaccaacacagatcttatcactctggaggtcagaagtctgatatggttcccactggactaaaatcaagtgttggcagggctttgtccttccggaggctctaggggagaatctgttccattgtcttttccggtttctagaagccacctgcattccttggcttgtggcacctttctccattcaaaggcagaagggcagcatcctgccagtctctgactctgaaacctcttgcttctgttttgtgattacattgaggccagctggataatccacaataagctcatcatttcaaactccttaacacttctacaaagtccatttaaggtgagattctggggatgaggacatggacgtctttgaaggaccattatcctgcccaccaggaggctactgcaatagtgcaggcaagagatgatggtggctttgaccagagtaaccgcaatgaagatggtaagaaatgatagctttctggatatattttgatgatagagccaacaggatattctaagggattggatgtggacttttccttcctcgtgcaggtagacttctagtctacctgtgccttgggcctgcgcctgggtgaggatgagggtttccctggggtaaagtccagggagtcacagtcattgactggagcctgtgtggccgtctagggcctgctgcatggcctgcatgtggtcagacaaatgggtatggagtaggccctgtaacccaccattagcacaagtgtagggtcctttctggtcaacagtttcacccacctccccctcactcctcacttaacccctcaagttctgctgggttgggcctttcctgcccccatcgcttactttgccccactcccctgggaggtgagacctgctcccaggcccaccacactttatttatttacctgtttgtaggtgtgagtgtctctctgttcattcattatttgcatgtaggcagaatagcacagtggctaaactggttgcctttacagtaagaatcccagctctgcctcctacaagtgtgtgatcttaggcaagctgtccaacctctgttaatgtataaaatgggaacaataaagcctacctcatatagttgttgtgtgggctaaatgaggtaatgcatgtaaaatcctcggctcagtgtctggcttagcataaagtgctgatgaagattctctgttattttctcacggttcaagtgccaaccagtccactcaataatggtgtgatcttcggcaagttattcaacctctccaagcttctgtttcctcagctgtaatctgtaactacctcatagaactatagttggatgattaaatgagataatctggctgggcgtgatggctgacacctgtaatcccagcactttgagaggccaaggggggagaatcagttgagtccagcggtttaggaccagcttgggcaacatagggagaccctgtctctacaaaagatacaaaaattagctgggtgtggtggcacacacctgtggtcacagctactcgggaggctgaggtgggaggatcgcttgagcctgggaggcagaggttgcagtgagccatgatcgtgccactgcactccagcctgggtgacagagtgagaccctgtctcaaaaaataaaataaaataaaaataagtaaataaatgagatattctatgtaagctgtcagagtgagagctccgtggatgttaatgattattattcctgttgttattatttcataaatatctgttgaatacatactctgtgctaaggcctttgtctgtgttgtcactgaatcatcagaatggcctggtgaggaatatagtgttatttctgtttcacagacaggaaaaccaaggcaggtaaagcacatggctgaatggcagagccccaattctaatctaggtctgtgtggtaggcaccaaaacatgttccctcttcattacttcaacgcacttttaaaaattgagataaggggccgggcgcagtggctcacgcctgtaatcccagcactttgggaggttgaggtgggcagatcatgaggtcaggagtttgagaccagcctggccaacatggtgaaacctgtctgtactaaaaatacaaaaattagctgggcgtggtggcgcatgcctgtaatctcagctactcaggaggctgaggcaggagaactgcttgaaccgggacccgggaggcggaggttgcagtgagccgagatcgtgccattgcactccagcctgggcaacaagagtgaaactctgtctcaaaaaaaaaaaaaaaaaaaaattgagataaggccgggcgtggtgtttgtagcctgtaatccaaaactttgggaggccaaggtaggcggatctcctgaggtcaggagttcgagaccagcctggccaaaatggggaaaccctgtctccactgaaaatacaaaaattagccaggtgtagtggtgggcacttgaaactgggtggtagaggttgctgtgagccgagattgtgccactgcactccagcctgggcaacaaagcgagactctttgtctcaaacaataaaaataaaaattgagataaaattcacatgacataaaattcaccattttggtcgggtgcggtggctgatgcctgtaatcccaggactttgggatgctgaggcgggcggatcacctgaggtcaggagtttgagaccaccctggccaacatagggaaaccccatctctactaaaaatgcaaaaaattagccaggtgtggtggcaatacctgtaatctcagctactcaggaggctgaggcaggataattgcttgaacctgggaggcagaggttgcagtgagccaagattgcaccactccactccagcctgggcaacagagtgagactccatctaccaaaaaaaaaaaaaaaaaaacctcaccattttaactaaagtatacaatgcagctcttttttattacattcacaatattgtgtaaccatcgccacaatctagttacataacattttcgtcatcccaaaaagaaaccctgtacccattaagcagtcattctcctttttccccctctctggaccctggcaaccactaatctgctttctatctctatggatttgactattttggacatttcatatagggtcagcctgggtgacagggtctcactttgtcacccaggctggagtagagtgatgaaatcacagctcactgcagcctcgaactcctgggctcaagtgatccttccaccttagcctcctgagtaactgagactacaggcacacaccaccatgcccggctaattttatttattattattattattttgtatagctggggtgtcactatgttacctaggctggtcttgaactcctgggctcctgcgatcctcctgccttggcctcccaacgtgctgggattacaggcatgagccacagggcctggcctcattcctttgcatttggatacccagctgtcttagcaccatttgttgaaaagactatgcttcccccatttaatggtcttagcacacttgttgaaaatcaattgactatagatgtataggtttatttttgtactcttgactctattcaattgatcgataaacttctttattgtagctttgcagtaagttttgaaatcaggacatgcgaatctttcaactttatttttctttttgaatattgttttgactattcagggtctcttgcgattccatatgaggtgtgggataaacttgtccatttctgcaaaaaatgcagctcagattttgaaagacttgtattgaatctgttgagcaatttggagagtgttgctgtcttaacaattaagtcttctaatccatggacatggaatgtgtttccatttatttatgtcttccttgatttctttcaacaaggtttggtacttttcagaggacaagcctttcctttccgtggttaaatttattgctaaatgttttattatttttgatgctattgtaaatggaaatgattcttaatatcattttcatattgctcgttgctaatgtacagaaatacaactgatttttgtgtgttgatattgttgaactttgctgaactcattttagttctaatagctttctgtgtattctttaggtttttctctatatgagatcatgtcatctacaaatagaaatagttttacctctgcttttccaatctggatgccttttatttatttttcttgcttaattgccctggcaagaactttcagtacaatgttgattggaagtgatgagagtaggcatccttatcttattcctgatcttagggggaaagctttcggcctttgtcttcaccattaagtgtgatgttagctgtgggttttgcacagatgccttttaccaggttgagaagttctctcctcttcctagttggctgagtgtttcaggttttgtttttttgtttgtttgttttttgtttaatcaggagagaatgttggatgaactcttttttacaactaaaaatcagcgaagtcctctgtatttaatttggtataattatgtgagaccaagtttcataattaaggttttatttcataatttttttgattttttgggacagagtttcactcttgttgcccagactggagtgtgatggtgtgatctcggctcaccgcaacctccgcctcccaggttcaagcaattctcctgcctcagcctcccgagtagctgggattacaggcatgcaccaccacgcctggctaattttgtatttttagtagagatggggtttctccatgttgaggctggtctcaaactcctgtcgtcaggtgatccgcccatctcggcctcccaaagtgctgggattacaggcgtgagccaccgtgcccggcctcatttcataattaatgttttcaaagaaggttacaaatatatggctgggtatctttaaccatgtgactttagtcaattcctacttctttgggcctcagtttcctcaactgtaaaatggaggtggatagtaatgcttacttcatggggcttagagggatgatggagataagatgggatttttgtgtgcaaaggcactttgcaaataaaaactattcttctgttgctgctcttattagagatactttgtgtgtgtatttttgttgttgttgttcgtttcttttttgagacagggtctccctctgttgcccaggctggagtgcattggcgtcatcatagctcactgtagctttgaactcctgggcccaagcaatttttccacctcagcttcccaagtagcccagactacaggcttgcaccaccatgcctggctaatttttaaatttttttctagagaagagatctcactatgttgcccaggatggtgttgaactgtggcctcaagcaatcctcccaccttggtttcccaaagtgctgagattacaggcatgagctgccatgcccagctagagatgttatttatttatttatttatttatttacttatttacttatttttgagatggagtcttgctatgtcgccccggctggagtgcagtggcatgatctcggctcactgcaacctccacttcctgggttcaagtgattctcctgcctcagcctcctgagtggctgggattacaggtgtgcaccaccatgcttggctcattttcgcattttttaagtagacttggggtttcaccatgttggccaggctggtctcgaactcctgagctcaagtgatccatccacctcggcctctcaaagtgctaggattacaggcatgagccaccatgcccagcctggagatgttgttttaaattgtaatataacatgtttaataaagtacataagatacataaagggcaatcgtcttaagtataaaaactgattaatttgtatacagccatgtgaacacctctggatcctgctattgaacctgttagcaccttgtaagggtcctcttcctggtctgtacctccctggaggtaaccattattctgattcctaacaccatggattagttttgcctgtttttgagcttcgtatatatggagtcatacaagcttttgtatctggtttctttcactcagcataatatctgtgagtcatccaaattcttgcatgtatcagtggctcattctttttcacacagttttgaataagttaatacgagttggtcaaagtttgaaaaggctgtgcatttgtctgagagaccagaaaaatacaggccagcaaagcccagggctctccagtattgagccagtccactctgtgaatctctatttatggcagctgaattctcagccaggatggcagctactttgcccatgtgtcaccacttcccatcccataccctgggtagacatcacaaatccatcttgagcacttttttttctttttttgagacagtgtctcactctgtcactcaggctggagggcagttgcatgttcacagctcactgcagcctcaacctcctgggctcaagtgatcctcctgcctcagcctctcgaataactgggaccataggtgtgtgccaccatgcccaggtaatttttaattatttcttgagactgagtgtccctatgtcgcccaggctggtctcaaactcctgggttcaagcaatcttcccatcttggcctcccaaagtgctgagattacaggtgtgagtcgccatgccgggccaatcttggcacttttttttacaagaacttctgatgcagcctcaaaattcttttcaacccagcggtccaggtggccaacactaattgcttgtagttggtacttgatatagtttggctgtgtccccactcaaatctcatcttgaattatatctcccataattcccattgttgtgggagggacctggtacgagataattaaatcatggcagcggtttctcccatactgttcttgtggtagtgaataagtgtcatgagatctggtggttttataaggagaaacccctttctcttggctctcattctctctttgcccgttgctatccatgtaagacgggacttactcttccttgacttctgccatgattgtgaggcttcccctgccatatggaactataagtccaattaaacctctttctttttgtagattgcccagtcttgggtatgcctttatcagaagcatgaaaacagactaatacagtactcaagattaaatctgaggcttctgctgtcatatccccaagatatttttctgggctcccagagttagaacatgaggggctctgttatcaccctcagtttaccacacagctgtatgaaactgatggtggtgaggtccacagcatcttcctgttcatatatcctttgggtaatggctccaacccagcaagtgttttgctacctatgtacctgggagcaacttgacttagataagaggtgatgaggcagactgcttagatgtggaggggctgctgcacccatgaggtggcttgactgaagcctctttgtttttctcttttactttgctaaaacattgcagtgtctcaattacggaacaaacacaaatgtgacttaatgtttaacaatactcctgtgaattcttgacagttctagcatgtctctcacatttgaaaaacttattccaaccacaaaattgggtgaaatgaactctaccatcctctgggaatggctgcctgtatgtgcagggttggaggttgtggctgattaaaacaacaacaacatccaactcatggcttttgtccaaatgtaaatcatagtctgagggaggagataagactcacatataaactaatagaggaaaagtccagctaagctctcatttatttgaaactctgatcctgagcaacttcacatatttgaaaagtacaggaaggaataaaaaatacctttgagaagctgtatttttcttcatgggagagcatttcagctcctcatttagaattggtttattctttgtttttgtttttgttttttttttgagacggagtctcgctctgtcacccaggctgtagtgcggtggcgagatctcggctcactgcaagctccgcctcctgggttcaggccattctcctgcctcagcctcccgagtagctgggactacaggagcctgcaaccacgcccggctaatttttttgtatttttagtagagacggggtttcactgtgttagccaggacggtctcgatctcctgacctcgtgatccgcccatctcggcctcccaaagtgctgggattacaggcgtgagccaccgcgccggctattctttgttttcatgcaaggttaacacatgcaaaagattggaagcagcaaattagaatggtaggcttggggcaactactggctactaacagcagcctcactgctaatggatggagaagtgattttttccccctttttatccaccactaagagtctagagaagtgatgcttgacaccaaagacaatggaaaaacaatgaaatgtggtaccacaattagctgcgtctgtttattgcagaggcaaaaaagtcctcaacgcttctgccacttttgaaagttctgagtctggttcaattcttattgcctataaagatgacagaatacctaagaataaaatacacatttttgagcatccgctaggtgccaagtctatgctcagcaagtactttacattctatatctcacataagcttcaggtggtcctgttacgatcatctccagtttatacttgcaggaagggaggcacagaaagtaggggaaataacttgcccaagtaagtagtcaaggctgggttttgaacctttgctatcaaagttcagtgccaaggcccttagcttctgctaggtttcaaaggatctgttaggtgaatgaagagtagaaaggcattccaggtagagggaagaacatttgcaaagacaggtctagtcagtcagtcacttgatttctctgaatcttggtttactcccctataaaataggaacagtattatctgtcctaggctgcttatgataattaaatgtgtttttttttctttttttttggagaccaagtcttgctctgtcacccaggctggagtgcagtggcgcaatctcagctcactgcaaactctgcctctggggttcaagtgattctcctgcctcagcctcccaagtcactgggattacaggcacgtaccaccatgcctggctaatttttgtatttttagtagagacggggtttcaccatgttggccaggctggtctcgaactcctgacctcatgatccatctgccttggcctcccaaagtgctgggattacaggcgtgagccactgcccccggccaaatgtgatattatatgtacagcactttgcacaatgccagaatgtgcatcgatggtgcaatcacagaatgtgcatcaatgttaattattgttgtttttcaaatacaatagttctcctttatcctcaggtgtacctgcaagtggatgcctgaaaacataaatagtactgaactttatatatactgtgttttttctatatatatacatctatgataaagtttaatttataaattaggcacagtaagagattaataacaactattaataaaatgggacaattataacaatatactgtattcagttttgtgaatgtggtctctctctcaaaatgtcttactgtactgtattcacccttcttcttgagattatgcgtgatgtcaaaatccctatgtgatgagatgaagtaaggtgaatgacacaggcattatgaggtagtgttaggctactactgaccatctgagatgtcaggaggaccatctgctttgggtgatcctggatcattgagctatgacgatgtcagtggttggatatcaggatcagacgatgtcaaccaatgattgggggtccttggataattgcgtttttgccaaaaacttttggaagaacattattactggaagttgtctctttctttctttttctgagatagcatctcagtctgttgcccaggtttcagtgcagtggtgtgatcatggctcactgcagcctcaacctcctgggctcaggtgatcctcccacctcagcctcctgagtagctgggactgcaggtgtgcgccaccacacccagctagttttttgcattttttgtagagatgaggtttcaccatgttgcccaggctggtctcaaacctgtgagctcgagtgacccgcctacctcagcatcccaaagtgctgagattacaagcgtgagccgctgcacctggccatctctttctatttaattcttttttttttttttttttttgagacagagtctctgtcgcccaggctggagtgcagtggcgcaatctcggctcactgcaacctctgcctcttgggttcaagcaattcttctgccttagcctcccaagtagctaggattacaggtgcacgccaccatgcctggtgaatttttgtatttttagtagagacaggatttcaccacgatggccgggctggtctcaaactccgggcctcaagtgatctgcccacctcggcctcccaaagtcctaggattacaggtgttagccactatgcctggcctctttctttttaattcatagaagtgtggctgcagaagttgtaatcctttggtgaccacacgagtggttttaatgctgtgttctatctgaggattgaattccataattttgtcctttaatgtctgtgcaatttgaaacactcggcaaattttgataacacccatattgctggttctgtttctgtttctccttcattttcctctttctttgtagatgacttgacaagttcttccaattccacatttgttaacacttcccagtggccttcaatatgatcttccacttcttcatcaagcatgtccccaaatccttctccaccaacttgtcttgctgtagcctctccagtaatatttatttatttatttgtgacagggtctcactctgtcacccaggctcgagtgcagtggtgagatcacagctcactgcagtttcaaactcccaggctcagatgatcttcatggctcagtctcctgagcagctgggactataggcctgtgccatcatgcccagctaaattttgtattttttgtagggatggggtttcgccatgttgcccaggctggcctcaactcctgggctcaagcgatccacctgccttggtctcccaaaatgctggaattacaggcgtgagtcaccgcacccaacctccagtaacttttttttttttttttgacacggagcctcgctctgttgcccaggctggagtgcagtggtgccatctcggctcactgccagctctgcctcccgggttcacgccattctcctgcctcagcctcctgagtagctgggactacaggcgcgtgccaccatgcctggctaatttttttgtatttttagtagagatggagtttcaccgtgttagccaggatgatcttgatctcctgacctcgtgatccgcccgcctcggcctcccaaagtcctgggattacaggcatgagccaccgcgcccggccttttttttttttttttttttgacacggagtctctctctgtcgcccaggctggagtgcagtggcgcaatctcggctcactgcaagctctgcctcctgggttcacgccattctcctgcctcagcctccagagtagctgggactacaggcacccgccgccaccatgccaggctaattttttgtatttttagtagagacggggtttcaccttgttagccaggatggtctcgatctcctgacctcgtgatccgcccgccttggcctcccaaagtgctgggattacaggcgtgagccaccgcgcccggctccagtaattttttttttctttttgagacagaattttgctcttttcgcccaggctggagtgcaatagcacgatttcagtttactgcaacctctgcctctcaggttcaagtgattctcctgcctcagcctcccaagtagctgggattacaggcgtgcgccaccacgcccagctaatttttttatttttattttttatttttagtagagatggggtttcaccacgttggccaggctggtctcaaactcctgacctcaggtgatccatccgcctaggcctgccagagtgctgagattacaggtgtgagccactgtgcccagcccatccagtaatttttatattttgcagtctaaacctattcctaagtcagtgcaaccatccattactttcagtaagtggcttggtgccactggttttaggagattccttgctgaagcctttatacaggctcaatgctttctggggggtaacaggttgctgtcagttggaacacattttttgttcgtgtcttccacgtataagcttaatgctttttcttttcttttgtaaaaaaatttattttctttttttcccctgtaagtaaggatacaacttaatgccttttctatcttaactaagcacttatcacacactgtggctgtaacttttgcagtttgaggtacgacagcaaaaccagcatgaatttctttttcctctttcacaattctagggctagaagattcgttcttactgcagacctcagtaagctcagcatacgattttttttcttaagctcagaacttccacatttacatttaaaggaagcactttacagcttcattttggcatatccaaactgccagcattactactcttgcactttggggccattatatagtaaaatgagggttactcgaaccaaagcactgcaacaccgtggcagtccatctgataactcctaagctggtaagtaactaacagatggtagaggtatgttggacaaagggatgattcacattgcaggtaggatggaacaggatagcacgagatttcattaggccaatggaaattaaaaacttatgaactgtttatttctggaattttctatttaatactgtcagaccttagctggccaagtgaaactactcaaagtaaaatctcagataagggggacactaccgtacttaactggagaagatactgctttgcttctgtgaccacagaattgacaggttgaaattggaaacaactgttgccttcacgcttttaagacaacttcacatgaatatacatgtgaagttcaagcatggcagtatcccatactagcaataaatttttgagcagtgttgcacacttactgtcatttctcttactgttctgccactcctacagagcgcaggccaaggagactacatttcccagaatgccacacgccctttgaccccagctacagcaaaagacgcgccggggagcgcctgaagccggaagactatagcttcccggcatgcagcacgcttccccctattagatttgaggcgcggccggcgcgttgcccactgggagttgtagtcagtggcgcgttgccctgacgcctgccgggccgggcgtgggggcctgtgggaggtggcgcggccgggcccagctgcggggcggaggcggaggcggaggagaggcctgcggcggcagggagcggcgggactgggagcgggcgccggagccgacccgagccgagccgagccgagccgagccggagcgggcggcgaaggccggcgcggcgagcagcaaccatgtcggtgttcgggaagctgttcggggctggagggggtaaggccggcaagggcggcccgaccccccaggaggccatccagcggctgcgggacacggaagagatgttaagcaagaaacaggagttcctggagaagaaaatcgagcaggagctgacggccgccaagaagcacggcaccaaaaacaagcgcggtgaggctgcccggccccttcagacttgccacgggctccccccaggctccccgggcccggacttcaccttcatcagactcgcctcggggtctggtctgaccctggaactctccgggtcagacttcttgccgggtctgggaccccctccccgactcccttcaatgtctccccgatccctggacttttccatcgtcagacttattctgccctctcccctcagcctctctccaccccgccaggtcccttcagaccccaatctcacagcactttcctccgccctcactctgtccctttctcttccgccttttccttctcgcctcacccacctgcctagctactgcccctgcctcctcctcggctcatttctgcccccatcctagcatttctgtgcttcctggtcctacctgtgccctctcccgactcctcggtggaatctgtgagctgccccttggcctctcccctgtcctcttgtctcagaattctcgttgaaaagcctccttgctggagagaaaaggggactgggggagatgagacccccgattcctgctctattcacttgctgagtgaacttgagcaagttgctttccctttgaggcctcagtttccccatccgtcagccagagttcggcctctgttgaggcctaaggtgttttccagcgttgtgattcactttttgttgcctcgtagcttgaccttaccaaagtttcccgtggcgcaagccttcaccccatgactcaccgcttccccatccgtctgaaccagaaatagagactcccgactgctccccagtccccactactaggattcagggccccagtattgaatcttgaggcactgcttactttacttcctgttgtcgtatggctttctgggcattccaagtgctttgtgtttttcttaagtgagatgaatgtgaaaatgctttaaaactgtaaagcagtttagaaatgtttgctttttcttgttatggccatgtgagagtgaatcacagaacgacatcccttccccttgagaggggtttaggattgaggtaattcactcagaagtctgctagtgactagcagtgcgaccttgagctcatttacctttctgaaaggaaaatcatggatttacagtgctcagcacatagtaggggctaaatcgatgttttctccattctaataggagaacaaaatagcctatctggaggatgcttctctgctgatagtcaacagatattctggaaattctttttagtgcctgctgcatgcgctgtattcataggggtgaacaaaacacggcctcaaccctaatgggagagaagacagaaacaggaaaataaatgaagaaaatattgtccgggggtgataagtactaaacacacaaaaagatggtctgatagggagtggtggagtgggagggatgccactttggatagaatggtcagggaaggcgtctttgaaaaggtaaagtttgaactgagtctggagaaggaaccagctctgtaaaaaaaaaaaaaaaagggggaggagccttctgggcgtggaaagcagcatgggaaaaggctcggaggttagcaggttgtaagaaaccgaagagagagacccttgtgtccagaatgtagtgcttggagggagagtggtatggaataaagggggcggggcttggactttgaacctgttggtgaagagtttgaattttattccaagtggatggaaagtttttggagagtattttgttggaacgtgtccttattgacagagtttttaaaacatcatctggctgctctttggagagtgggtgggggatgcgggtgggagcagggagaacagtgaggaggcagctgcagtggtccatttgtggcttggactccagcttagttgtggagatgggaacagggttatattttgctgtctctagctttttcctctgatgactctccctcagtccagatcctctgtttatggtcatcagaatcagtgtttttagctttctgcattttggaatgcaggaggagggtgtcagtttaccattttcctctgatcttttggtctggagctagcttagtttctggagtttgtttttttgtttgtttgtttgtttgtttgtttttgaaacggagtctcgctctgttgcccaggctggagtgcagtggtgcgatctcagctcactgcaacctctgccttctgggttcaaatgattctcctgcgtcagcctcctgagtagctgggattacaggtgcacgccaccatgcctggctaatttttgtatttttagtagagatggggtttcaccatgttggtcaggctggtcttgaacacctgacctcatgatctgcctgcctcggcctcccaaagtgctgggattatgggcatgagccatcgcacccagccgtttctgcagttttggcgatcgaattgactttcaaggggctgcaggagagctcgccagccaactgtggaggaccaatctcagttgtcagacttgctgaaggcaggctgtctccctgagtttgcttgagaggatgggagctactgtaacctacccttctttttagcatcctctaggaggaaggtcttagtgtggggaggtgaacactaccacattaccattcagttagtctgcttattcacctgccactatgctgggaccttgagagtcagagatgaaaatacactgtgtcagcccttcaggaactcagaattggaagtgtggggtgggagtgtatgtgcgtgtgagagagcaggaaatgattataacagtgcagaaacatgagtgtgtacatgggctgaggctgcagaggaggcggcacctgtttggggggaaggataaagaagacttggcagaggaaggagaacgtgaggtgggtcagcaaggagttgggtgtgtttgggaggcagtgacagtgtcgcctctggagtctgtgggtgggacaggagataacactgagagtggcctgtagtctttggaccttgacctggaagtagtgaggagcccttagctgtcctttatttttatttattcattcactttaagcaacagggtcttgctctgacatccaggccgaagtgcagtggtgcagttatagctcagtgcagcctggcactcctgggctcaaatgatcctctcacttcagcctcctgagtagctaggacttcaggcacatgcctagctaattcaaaacatttttttttgtagggacaaggtctcgctctgttgcccaggctggtctcaaactcctggcctcgagcgattctcccgtattagcctcccaaagtgttgggattacagccactgtgctcagcccttggctggcttttaaagcagagagtcatcatatctgtttggaattttgaaagagcactctagcagcagcttaaaggaagaagtgtagactgaccaggaagggactggaggcaagaatcccatcaggggcaaggatagtgcctttcagacctgggtttgagctgcagcttcatcatttccttgctgggtacctggggcaggttactctgtacctcagattcctcctccacaaatcagggtactagtatctgcctgattggatgaaaatatgttacgcatgccaagctcctaggacaatgcctgccatatggtaagtgaccgataaatgcttgccattatcattattacaaggagacttgcaattcttcaggtgagaataaagggcctagtgtagaagcatgggaaactggaagagaaataatacatgtctgagacttttctgaaggagaatcaaaagagacttggtgatttgttgtaattgtgggagtgggcaggacgaaggagagaggggagtggaggatgattccccagttcatagcttgggcagctggttggatggtgatggcagtaatgaagttgggaaacaggagaaggagcgtgtacttgataattgtatagtcctggtaggtttggaaaaccgctcagcatcccctgaaactgtgaggtccatgaagtaagatgtgatggtcacattcatcactgtgtccccaccacctagcacagtgctttgcacatggttaatggtcagcatttgttaaatgaaaaaaacaatcttgtgggtaagttctgttattcccattgtacaagagaggaaaatgaggctcacgacgggacgaactcaactcaaagaccagttctgttgactgtgggcatcttgtgttgtttactcccatgatgactaagggtgtcatcatgaccatcaccatgttcattaaacactcagttcattaaacacccacctgtgcaaggtgtggtgctgagtaggggaaaaagaagtaaagcagaaacaggctattccctgctgggtgtgtagccaaatgtagatgctatctttgaggcatacacattggaaagatgaaacaaacttcagaagctttgaaacagacctcagaagcttgagtagagtatttgcactgtgtaggtgtgtcccaggtagtggttccagtgaggagcctagagcaaaatttggattgcttttttttcccaaatttcatttctttttctttagtcatatattcattcttaagcatgtggcaggcccttactgtgtcctaggccccatccttggtgctgagaatgcagacgtgaaccagatgtggtctctgccatccaagggacttaaatatcatcatttatgaaataatattcatctcacatgcctatggtgaggattaactaaggtaatatatgaaagagtgtggcaaattgtggatattgagtaagtgtacttttcttttctgataaagttattgttgatcagacttctttggtttagttgtctctttcattgagaactggatagaaaccaagatcagagtttaggtgaactgacagaaatcacccaaagctaggtcttttttggtacctttctaaacaatgccctttggttttctccctaagaaaggtgatcatacttttctggagaacatgtgggaaaaaaaagaaaagaaaaaaatggaagatgatcaaatatcaaagattcttttctttttaagtcttggtaactagctaaggaaatatctactctagatggttcagatttccctttttttcctgttttagtaaagatgaaaacagttgtagacaagatcatagtttaacaagagaattggagaagattaggaaatggagagtggcatctaaaacaccctatactggtacatttctgtgaatttatggatgcaaatcagttcatttacaggttaatttaggtttagctgagaatgtctgatggatgcatagaggccagaagctcacaagagatatatcttcattaagttctgctcattgctggagtgagggtggttttctcatgtttaataaagtctctctcaaacatgagcatatgtgaagacactgtaataagtttatagtcttatgagacaaagaacgtggctctttggttctctggaatcaagatctcaggttgaaaagcacagtgtcttaatggcgcatgtgccagcagtatctcttatcccagaggcccagggatagaaaactcgaaatccacccagggaagtgagcagtgggaatttccctcagtgacgcttaagtttcttgtttggaaaaatggttggctagattgagtttggtttacttcctaagacagatggagtaccagaggccctatgtgttggctatccaaacacactggttcctttaattcaaatgacaaatccttattttgccccatttggcagggagattagatatttttaattgcctgccagagtaggtttataatgtgatttgtaactcaagatagattttgtttggaagtttaactaaacgtgaagacctgtgagcaggactgttttgcttggagaaaccttgagttgtccagagttgggtttgagtgtggagcgaggtcttggagagcatcctatgaagatgtgtgcgagccagccatctccgaggcgtaaagccaggacctaatttgtttacagtggtccagagccttgacatgaagccagagcccaccaggaggaggggcagagctcttggggccttgaggaatttcttatgaaaacttagtcttcttgctcagaattattttgggttgtgccactgtctttaagagtgtgagagagaggatattagaaaacaactttagttggtcattttgcagatggatgattatatttagaaggggaaaatctgagcatagcaatgggaaactacagatctagctgtttgtagtactggcctgtttttaagctgtttggctcaagtcagcaatcatttattacgtttcttctaggtggaaggtgtggtgatgtgggcaaaagattcccagtttgaatgcagctttacctttcatcagtagtaccttggtagttacttatatttctctgagtctcaattccccactgtgtgaaaagggaaatactaccaatacttacttgttagggctcttatgaggatgtggaataagttgatgtatgtagagtgcctgccagaatgcctggcaaataggcgagatgaaactgtttccttggcttcccagggatagtcttagggacagtaaggctataaagatggatgagacactgccttctccccacaagggcccacacagttcatcgaggaagacacacaggtaaaagtaactatgagaaaaggcaaaccccaagtttacaaatgaagtgttagaggaaaatacagcaggaagagtttaattcatctctgaggttgcaggttcatctcacccagccacccatccaatgcccagattccctctgtggcattcctgccaagtgattaacctctgattgaacccctctgttgacaggatttatattaggtgccctatcctctcacactatagcatagtctgtctctggacagctccaactgtaaaatcacctttcttaattgggactgatatctgtctttctatagtacctacctctgctacaggttgggataatagctccatagggaagcagcctgggctggtgaaaagaatgtgggatttggggacagaagggttggggcaaatcccagctttgacactagacatttgtgaactagaaaacgggttgtgatttctgcctcttggggccacagagaacaggtctgatcccgcttctacatcacagatcaaggaagattgtgtttatgtctcaagcctgcacttctctaggacagccattctacatttcattgactgtccattttttggtgcttctgttccttcctttttactctcctttggatgtgctcctgttcaccagtgttgctcttttttgtttgtttttttttgagatggagttttgctctgttgcccaggctggagtgcagtggcgccatctcatctcactgcaacctctgcctcccgggttcaagtgattatcctgcctcagcctcccgagtagctggaattacaggcatgcgccaccaagcccagctaatttttttgtattttcagtagagacgaggtttcaccatgttagccaggctggtcttgaactcctgacctcaagtaattcgcctgccttggccttccaaagtgctgggattacaggtgtgagccaccgtgcccggccagtgttgctcttaaggtgtggagtggacagagctgaataatctgaatattctagccaaagtctgagcagcacaaccctagaacaggcagggccgagccatttgtttaggaactagtttggttatgagtgctctttagccctgatacttccggtatcactgagacagggaaaagtgatcgtattttcctgtggcttattcattagtaaagggatgagcatctaggaacccctaaagtttgtttggtccttcttaaagagtcttagctgaaggattgaatgatttaagttcttaacaagagcatctgctggcttgattccttgacagctgatatttctagctctacctcctccctcttccttacagggcagagctggcttggagggcttatttgagtgatggaggaaagctatacatccctctggttgtggttgtttagctcaaaaggtcagtgatgtggtatagtggaaaaggtgctagctttggggtgagaaggcctgagttcacattccacctctgccgcttgctagtttggtaacccagggtaagcctcctcatgtctctgaacaacagcttctttagctacaaaaatggaatacagaattgactacacaagctttctgctcaaagtgtgggctatggagacatctaggaaattgttagaaacgtggattctggccaggcgtggtggctcacgcctgtaatcccagcactttgggaggccaaggcgggtggatcacgaggtcaggagatcgagaccatcctggctaacatggtgaaaccccatctctactaaaaatacaaaaaaaaaaaccaaaattagctgggtgtggcagctggcagctgtagtcccagctactcaggaggctgaggcagcagaatggtgtgaacccgagagccggagcttgcagtgagccaagatagcaccactgcactccagcctgggcaacagagcgagactctgtctcaaaaaaaaaagaaaaagaaaaaaagaaatgtggactcttaggccccatcctgacctactgaagcagaacctgcattttatgagatcctcaggtggtttgtatgcccatcaaagtttgagagattttaaaacagatctggatattttacactttggggactctgatgttgagatcccaaatctttgatcttaatgctgtataggtacacatttgcatttaatttcagttgatccattttcaaagatggtagctagaaacttgcttcattcatgaatctatttgatagataagtatgtagtaatttgagctgtatgctagatactgtcctagttgctgagtaaatgcagatgaagacaggtccttgcctctgaggtgcttaaaatctagccaagtgacacaagtaaacagataaccagggtacagtgtgatttgttctagaagcatacttaggattcagtttgtgacatgcagtggagggaactggaacaacttcattgtggggggtgggggacttcaatttatgttttatcgaatagttattttggggagtaatggaatgttagagcagaaaggaactcaaaatgtatgagtgcttgaaactttaaattaataggaagagttttttgcgaaagaaaaaccaggaacgtggaactatttgcagtactttaaaaaagtactttatttgaatcagaagcctcttagcggggacatgagaatggatcagtgtttaacttggtcataaaataattagctttggaatactaaatttagagtatagtttattctgataattaatttgcttaattattcagttaatgattcagttaaaattataattgtcttcctacggaaggaagtaggaactaagaaacctgagcagtggattctctactgtctgcataagcaatcattataaattcctggtttggccgggtgcggtggctcacgcctgtaatcccagcactttgggaggctgagatgggcggattacctgaggtcaggagttcgagactagcctggccagcaaggcgaaaccccatctctactaaaaatacaaaaattagctgggcgtggtggcaggcgcctgtaatcccagctacttgagaggctaaagcaggagaatcgcttgaaccacggaagtggaggtggcagtgagccgagattgtaccactgtactccagcctgggtgacagagcaagactccatctcaaaaaaaaaaaaaaaaaaaatcctggtttgtagtctttataatatctaatagttgtataaataaaaataagactttacatgtgtgtagcccagttgctattccctgcagaggtttggagaggagttgctacccagactaggatttactctgtgactcctccagtaggctgaggaatttgatcagcatggtgtgtcccagagttccctggacttggagacattgactgacaagactgacatttaaaacccagattaggctgggtatggtgactcacacctgtaatcccagcactttggaaggtgaggtgtaaagataacttgaggccaggagtttgagaccaatataggcatcaaagcgagaccctatctctatttttttaaaaaagttaaaaataaaagcccagattattgctattttctttcttttcttttctttttctttctttctttctttgtcagtcttgctgtcgcccaggctggagtacagtagcaagatcttggctcactgtaacctccgccttctgggctgaagacatcctcccacctcagcctcctgagtagctgggactgcaagtgtgcaccaccatgcccagctaaatttttgtatttttttttttttgtagagatggggttttgccatgttgcccaggctggtctcaaactcctgagctcaagccatccacccaccttggcctcctaaggttttgggattacaggtgtgagctgctgcacacggcctattgctattttatttatttatttatttatttttgagagtactgagtctctccctgttgcctaggctggagtgcagtggtgtgatcttggctcactgcaacctccacctcctgggttcaaacgattctcctgcctcaaccttgtaagtagctgggattacaggcacgtgccagcacacccagctaatttttgtatttttagtagagatgggggtttcaccatgttggccaggctggtctcgaactcctgacctcaggtgatccacctgcctcggcctcccaaagtgctgggattataggcgtgagccaccgtgcccagcctactgtcttaattctctatcaggtgaactagttgatttcatctctccaaagcatgttctccctttagaattttgcacataggcagcatgtcatcgcagattgcttggcaagtctggaggtaggactttgggtgtcaagttgtaatgggctccgatagccttctgtggccttgtctaaggagggaactgatgtcagcctggcattcagcttgctgctcctagctgacagggctgcagggctcacagctgcggacagccctcctcatgcttagattttagaggtaattttggaggtgtaaaggacacagcaatataggcccaggcctagttaagtacttttctttctttctttctttttttatttttttgagacaagagtctcattctgtcacccaggctggagtgcagcggtgcgatcttggctcactgcaagctccacctcctgggttcatgccattctcctgcctcagcctcctgagtagctacaggtgcccaccaccacgccgggctaattttttgtatttttagtagagatggggtttcactgtgttagccaggatggtctcaatctcctgaccttgtaatccacccgcctcagcctcccaaagtgctgagattataggcatgagccaccgcgcccggcccagttaagtaattttcatcatgcttaaaaacattgtatttcaaagaaaaattttttttttttcaaaaaaagtatccccaggaaatgaaaacatttcccccatctttgggaaataccatgtactttacaaacttgatcatgtttgatcttttcagcaactccatgtgtgagtggtattatcctattttagagatgagaaagtcgaggttcagattatatgagtcactgggcagatctagctctgtgacttggggatcctgaggtgggctgtatcacagtagattttctggtgtgtttgatattccataggatctcagctctgtcgcccaggttggagtgcagtggtgtgatcatggctcactgtagcctggacatcctgggctcaagtgatcctcccacctcggcctcctgagtagctagaactataggcatgtaccaccaaacttggctaatattttattttatttttcagacagagtctcactctgttgcccaggctggagtgaaggggcacgatctaggctcattgcaacctccgcctcccagattcaagcacttctcctgtctcagcctcccaagtatctgggatcataggcgtgtgccaccacagctggctaatttttgtttagccatagggtgaagccaatagggttgcacgatattggttaggctggtctcgaactcctgacctcaggtgattcactcggcttcccgaagtgctgggattacaggtgtgagccaccgcacccagcctaattttttattttttatagagatgggggtgtcactatgttggccaggctgttcttgaactcctgggctcaagcagtcttcccacctcagcctcccaaagagttgggattacagggatgagtcaccacacccggccccagattgctataatccttgagtgctcgtaatttatcaatagacagaatcttgtcattggaaatcaatttttataatattccctgtacaatatgagcacctatgcttattctgcagaggaatacttcacagtgttttatggcttccaaagaactttcacatacataatctggttttgaaactcagagaagccttatgtagggcagattatggtttttagccccattttttccctttttttagaggaagaaactaaggctcaaaacaattaaattgtgaacctagaggcagagtcaaggctagagcccttcttgaggctccaagtctagtgcgtttctgccactctgtgcatccaccctggctccttcctgttaatgctgcatttcagattccccccagcttcagcaaggctgtgtcagtagtgggtgtggtcaggttgaggagcacaaggttggggttggggtgtgggggtcccaagagtgactggaccgtgttatacacagtgggactagtgccaaggagacgaccaagaggagactgttattacattctggaatggcttgacagcctttattcacttgtcttcattcattcaattcgctacatcaacattgtgcatttccctgccaggtttctatcttttcccgcaataagctcattttctctgtgacctctagagtagggtttctcaaccttgactgctgacattttggactggataatttttttgttgtgtgggactgtcttgtgtattgtaggatgttcagcagaagctttggcctctaccttctagatgttcttaatacctccccatccagttgtgacaacaaaaatgtctccagatattgctgaatgtccccaaaagggtggggggagggtggcagaagctcctaggttgagagccatggctctagggcttgtcaagccactgcaaatagagctctagagtgttagaggctggtctaaggataagggggtcataaagagcagggctgggtggagcctgctaggtacttttcattctacccttttgttgttctgctggggaaaccaaggtctagagacttagcccaaggccacctggctctgctttctagaggtctggctagggctgggaacttgacctgaatccctcccactcaggactctgatcaacccatagtccctagtcttttcaggttgaagaaaccttttctaatttcaaaaaatatcaagaatgggtgtatgataatagttgtacttttaatacccgttaattgagaagatcagatattaattcccttcaaccgatattcactatatacccaccgtctttcttccctaggattgtgtctgcgtaaatggtagatggtcacatggtagttgtttttattattgtgtgatatattcatcatttagtgcacaggcagggcacagttgggcacattcacagagcgctggagtgaccactgtgaaccctatgagctcacagtccataggttgggaactgattgacacattataccaggagacttgagagaacagcaggtctgaaactctgggcttttcctgaaaccatgagctgtcttcacacttgagatggaaatctccacactctggaaataaaaagccaacaggctacccagagtgctcagtgctgctctctcaacagctatacactagggcatttgtgataaaagaagaggtatttggctggaaacaagctttaagtttctagcattagttggtaaatggtgcatgggtctaaggggagtataaaataatggccttgaacttgggaatctgtgtttgcagaacctctcatctcaaagcactgagcttctctgacaagaaccattgttcttatttcagaggtaagaggcagagaggccaagcccacacaaagggtctctgaaaaagagccagctccttccaggtttaggagcttggacccctgcttggcatcctagggtggagctgtttggttttatcaggtgatggtgggaaaaggaaaaaaggttgttaagttccacccagtttggcaaatattttgagtgtttactgtgagagactcaatttgaagggatggtgtgggtcatagttcttaccctccaggaactccctgtctggtgagggctgtagagaaagacagtgcataactctccgtaaaataaggcacgcctaccattggtattcagtcaaagtatggtaggagaaggaaggaggaagaagtgaattccagctgggagactctagggtagcaccagggggatggcagggattctgagctgggacttgatgaatgggatttgggaaggaggaggctggtaggaccattcgaggccgaggagactgtgggacccaaggtacagagattagcatatgctgtgtttgtatgtgggagggttgaggggttatggggtatagatgaggggtagtggtggctcaggtggggtgagagtatgggttgcggcctccctgaggggccctggatgccaagctgaggaatctgtgttagtttgaatttagcgagacacataccaaatggatactttctgtctctagagagcagtttgctgggaccagcagctatctccctacagcacccaggtgaagcttcccattggttaggttgtctgtccattactgcttgagggaatgaggtgtatctggggactgttcccttataaggaagtccatcggtcactaccctttctcttgtttgttctcccaattccccttctgctttatttgaagtccagccattctgggcagcttggtagaggcagaacagcaatttttctgttttcagagtatctcaggttgcatgtcaaaggtaagcaggcaaatcctctttgcttaaagtagcttgacccagcctcatttattaatcaggtccttggctaatattgtgcatttcactcccagctggctagctggctaactcagttagttgtgatctttgggattgtttaatcttcctttcatgtttatctttggtttaagagaaagctagttattctttttggttgatgacagtgacctgtatttctgaggccatacatttcaagttcagcccagacttgatctactatcccattcccaaaactctgagaatgaactcttactctcctccccctttcctgagctcctggcctcctgttagctgtcctacccctgggtgccccctccatcacccagattggtctggcagacccctaagactttgagacgctgcacagtagttcagactctgtcactgtatgtctttggacaagtaagggccttcctacctctgggcctttgttttgtcaacaacaaaatgggaagatggattaaatgagtgctgagatttctctgctgtaacattctgttagtcaacaagtgccacattacagtaaccttaccttcagacagccaggtgttgctccaagcagtttcactgcataaaaagatggagtagctcagccttcatcttatctgttaatagcttaggtacctgcctgcttattgtaaaagtcgaggtcagccacaggctgttttgtagaaggtactggacatttttctgttttgattccttggatcagaggccagaactgaataatggtttttagctgctcccctgatcctgcatccaggcaagcagcgcagatgctggaaggcatcttttctggtacctgagccttgtttggttcagtagcctgcctctgacttttactgccagccttttggcaaatcagaggcacaaatttctgttggggctcagcaggttcaagccctactggacaaacccccagcagtgaccagttaagcacactggggtaagacttgtgataggacttgacttcctcactgacccgcctttggggccacaggatgtaggggatttgtctcctgtgtgaggatcatgaagaaaggaaccagctgctgagggctggcctgacttgagtcattttatttcaatctgctttttaggatggcgatcgaagagaaaatcaatggtcctggtggtgtcagaaagagcagcgggcttttctgcaaaggcctcatgcttagcataagtcctggctccatcatgagcagctaagcctcttaggaatatggtaaacatttacccacctggttctaaattaggccctttaaaacctcaagtctccactagtgacattaaaacagccctctcccttttattaaccttcacagtacattcctgtctcttaagcagttctggaaaatcaaactttagcacacatcttgtccatacagagggaaatcccaggcccagagaggttaggtgacctgttaaaagtaatacagctcattgaagggaaagctgggactggaactcatgacacctatctcctcattccagtgaattctactgtagcctcacctgtttctcaacagacgctgtggtaaatgtggccaaccctgccagaatagttttgaaaataaagttaaagtgccatgcagaaagccagctgacggggagatggagcaaacagttgctattttagggggttgttttcttttgaattataactggcagtcagtggtgaggcgggcgggcacagccgtggtggaggatcacaaactacagaaatgttgcgcctacatttctgactctctgtgtgaccaggctgaacaaggcactgtctttccctgcatcagggtttcctccatgcaagggatcagaataattcctactttcggctcattttacaggactctggggagggttaggaagtctataaagagacctaagaaacagttggtatataaatagtaatttttggtgcttcttgtctttttttttttttctttttcgttgaggtataacgtatagtaagcagataagtctcaggtgacacctgaatgagttttttaaatgtatacacttgtgtaaccatcacatagatcaagatatgagaacattccagcactcagcagtctggagggtttatagcagtctaggacttgagaagagaacaatatttgtttattctggccccttttagaatctcagaggccatttatccttctgttactcattcaacatgtttcccaaacaccttgtagtacagggcacagtgctaggtattgctgggagtacagaaatgaagaattgttggcctctgtcttgggctcacagcccattagggattatgacttgaatccaagggagaaagcgagaagagctgcgaggaagcttggaggagagaggctgcttcttgctgggagagaggagggtgtgtggtatttatgtagacacagaattttccccagttctctctgtttataaacataggaaagggaccagattatgaacttcagccccttctcagccagttctttgcattctcagaccacattgggtacttggagaggtgcaggcccagccgagaatgcccatctgtggtgtttgctcagctttgcctttcccttgggaagcagaaacaaactcaggcaaaaataagagacacttccctccctttctttggcccctaggctctaaggaactgatttcccttctgtattgggtcttaaggctataaggccacaaatctgtgaattaattttggcctgaatttctttctttgccctctttggttgagtaattaaaaatttcaatttcttatgtgaaaccagaccccagaaagactttcctgatcattttcatgtatgagaaataagttttagattttcttttaattggctaatatatgcacgtacagctctgtagttggtaggaaaggaggaggctgtatccagagtagacacatggtgatccctttccttaaagagagtctccggagatagtttaagaccagtgcctaatgtagggtcagcctgaagagataacaccacaggacatctgagcattatagaaccacatcttggtacatgtgtagacagacagtagatagtagataggaagggaagaagggcagatggctctgcctggctgaatcttgttcaggttctgatgagttactgggtctgggaaatataaacgacttgagagatcatctgggcccattcccccactcccattttacaaatgaggaaacagactttgatttgaccagatctgactggcagcagagctggaaccagaaccaggtctcacgtgtggtggagaatgaagacattctggtggagtgctcagcaggatgtggaaggaagcttggctgggagagggtggtggtgaagaggaagatgaaaggagtggcagaagcatttggtggttccctcagcatatggagccaggaaaagcaaggcgctgggtgggagagacactgaggctgttgatcatctcaggggagggacctgaaagccctacagcaagagggtatgggggatactgtggccaggctgaaagattttgaatggcttggacatctatagtgcttatcttccttgtgttagttagcttgggctgccataacaaaataccatagactgggtggtttaagcaacagaaatttattttctcagttctggagactcagtcgatggtcaaggtgctgggtaattccgtttctggtgagagccctcttcccagctggaagacagctgccttcttgctgtgtcctcacatggcctttctgtggagtgtgtgttgtgcattgcagggagtggatagagagcgggggcgtctctcttcctataaggctaatagtcctgtcagattagggccccatccttgtgatgtcagttagccttaatgacctccaagaggccccatctccaaatgcagccacactggggccagggcttcagcatatgaattctggggggatacaggtcagtccatagcactccttagctttttgttttctgattgactactttaggacccgtgaggtattgtttttcttggtagggaggctgctttctgacattcctttctttacattattttctaaacaatcagattataatctagcactgtgaattaattgttcaaaggaacagagttttttttttttttttagtttttttgagacagggtcctgctctgtcactcaggctggaatacactggcatgaaaatggctcattgcagcctggacctccacagctcaagggatcctcccacctcagcctcccaggtagctgagactgcctatgctcagctaattttttttttttttttttccagatagctttgtcacaagactcaggctggagtgcagtggcgtgatcttggctcactgcaacctccacctcctgggttcaagcgattctcctgcctcagcctccagagtagctaggattacaggcacgtaccaccacgcctggctatttttagtggagacggggtttcaccatgttggccaggctggtctcgaactcctgacctcaagtgatccgcccacctcggccttccaaagtgctgggattacaggcatgagccactgcacccggccgtccagctaagttttaaaagtttctgtgaagatgaggtttcgctgtgttggccaggctggtcttaaactcctgacctcaagtgatccgcccaccttggcctcccaaagtgctgggattacaggtgttagccaccgtgcctggctgcccagctaagttttaaaaatttttgtggagatgaggtttcgctatgttgcccaggctggtcttgaactcgtggcctcaagtgatcctcctgctttggcctcccaaggtgctaggattacaggcatgagccactgcacctggcctcagagattatgttctctcagtgtttcagtgtctggtaattctgtgcagtttggagtttgttctttaattttattattttcacatatacagttgtaatcgacagtgttcagcagggaagatcggataacaaacccatgaaccagactgtttttgttttttaattgcgctaaggtatacataacattacaggtgtgagccaccgtgtctgacctgtgccccattttttaaggacaaggcaagactaccttttcccgaaagagaatcagcttcctgtgcccttcaccccttgctgcctcctgggcaaggaaaatcatttgtctgcaaccccttcatcatgtctctcttgattccaaaagcataaaaggctggttgggttttccctcttgccttgcttttctaacaagcgcgcacattggaagtatttttctgccggcatttcactctcttcccaacttccccacaaacgtccccagcccccatacctccgttgtcatctcggttgccagggtgctctcatgcttgctcaggcagaagggggcccttgttggcatggattcagctggaagcagaggaagaaaagccagtcggaaaagaaagagtgcatcccagcctgggaacggaaacccaaagcaggctgtttcccctctgtcccagccaagaacctggtcacctctcagcaagcctggctaagagcatccagcctgggacctggcgggtgggggaggagctcaatcagtgccttcattccacccgagggccacaccaaagcgccagtgccagtcataatcaggttgttcttagtaaatgatttgctttttaaaatataactgtctttccatgtctggggatgaggaagaaataggctgttgtttttgtttgttttgattaggtagtcatgtaaatggtacataattttaaaagtgccttcgttgcctcagtcactcccttcctagaaatgaccaattacaaggccctgaggtagtctctgcaattaaaaacatgtaccatacctatgtattctcctgagacacgcccatgtatgaatggtagtaattaggttacctttgaatcctgtgctctttatagttttacaataaatgattttttttttttttttttaaagagacagggtctcgttctgttgcccaggctggagtgcattggcgcaatcatagctcactgtaacctcaaactcctggtctcaagcaatcctctcgcctcagcctcccaaatagctatgactacaggtgtgcaccaccatgcctggctaattaaaaaaaaatttttttttttttgtagagacagggtcttactatgttgcctaggctgatctcaaactcctggcctcaagcgaacctcctgctttggcctcccaaagtgctgggattgtaggtgtgagccaccacggccagccagaagtgatttggatttgacccactctgaagtccctgaactccatcttcctcatatggatttagagaaggttaattcaaacttcaggtgctaacttgaattttgaagcccatggccccacagaaagatctgggagaatagtttctccctccctgccttatcttctcttccctgagttactggtctctctgagaaatggcatctccaccacctggttgccccagccaggaacttggaacttattcctgactcagtctccatttccttctgttgtacattcaaacaggtgatacaggcccatggtcttccctcttggtatctctcaagttcaccctctcctggtcagcccctctgctgtggcctcagttcaggctcttgaaatccacaccctctggattattgcagtggttgccagccccttctccccacagcagccagagggatctttctgaaatgtaaatctgatcacgttcctgtcctgctttgaatctttcaatggcttcctgctaaccctgggatagattccagcagctccttaacaagacatccaagtctgtccttgagtttctctctttagcttttatctttccttgttccctcccctattttctcatgcctctcttttcctgctgcttggatatattcctctgggctctctcctaccatcctttaaaatgcatgataaccccaaaggttagtttcccccctctaggcatccacagtaagtgtcctgtgctgacctctgtcatgtattacattgtccatatctgctggcctgtgaattccttcagccttgggactgtatcatttttgtccctagttccctagcagggtatcatgagcaaagtgtaattcctggtacagtagaatgagcaaaggaattgcctgtttcatctaagccgttgcatcctttgtagtattggtatgaagttgcttcatcttttctagtattgtcatgaagttgttcataatatcccctttttatccttttaatattcctggagtctgtagtgatatcacatttatcattctcgataccagtaatctttttttcctggtcagtctggctagaagttcaatcttgttgaacttctcgaagagccagaattttatttcattgaccttctttctcttttgtttcttttttgtcttttattgatttttcacttcgatctttattccctttcttctgcttactttggattttgtttgccctttatttgtatttgtatttttttttggagacaggttatcactctctcacctaggctggagtgcagtggcacaatcatagcttactgcagcctcaaactcctgggctcaagtgatcttccttgcctcagcttctcaagtagctggggcagtacaggtgcctgccaccgactaatttttgaaaaaaatttttaatagaaataaggtcttgccacgttgctcagtcccaagctggtctttttctagcttgttaaggtggaagctgaggtccatttgagattgttcttttctagtgtaggcttttagttcccttaaggtaccacattggtggcatcccacaaattttgatatgttgtgtttttattttcattcagttcaaaatactttctgatttcccatttcatttcttctttgacctacggcttatttagaagtatattatttagttcctaaatgtgtggggatttaacagattttctgttcgtgattcctatttattttatttttatttttgttttgagatggagtctcactctgtcgcccaacctggggtgctgtgacgtgttctcagctgactgcaataacctccacctcctgggttcaagcgattctcctacctcagcctcccgtgtaactaggactacaggcacacgccaccacgcccagctaatttttgtagtagagacgagtttcaccatgttggccaggctggtcttgaactcctgacctcaagggatccgcccgcctcggcctcccaaaatgctgggattacaagcgtgagccatcgcacctggcctatgattcctaattattaaattccatcccaggtgatagaagtaatgagattctttaaaaatattgctccactgtcttcttgctagcatcgttttctatgagaaatctttgtcatctttatttcagtatatgtaatgtatatttttttctttgtctgctcttaacattttattactgattttgagcacttttaatatgatgtgctttggtatatgtggtcttcttcaagtttcttaagctccagggtcattgagcttcttgtatctgtgggtttaaagttttcatcaaagtggaaaatttttggccgttatttcttgaaatgtttattcacctgccctcctcctttggggactccagttacatgtatataggttacctgaagttatcccacacctcactgctgctctgctgatgtttaaaattattttttctctctgtatttcattttggatagtttttattgctattcaagtttacaaatcttttcatcaatgaagtgtctgatctgctgttcatccatgtaataattttaatctctagaagctcgatgtaggtgtttaaaaagattatcttagtctatttgtgttgctattaaagaaataccagaggctggggtatgtataaagaaaagaggtttatttggctcacagttctgcaggctgtataagaagcatggtgccagcatctgctgctggcgagggctcaggctgcatccactcatggtggaaggcgaaggggagcttatgtgtgtggcgagagagagaggaggaggtgccaggctctttttaacaaccagctctttcgggaactgaataagaactcacttactcctggagaatggcattaagccattcctgagggatccgcccccatgatccagatgcctctcactaggccccacctctgacattggtgatgaaatatcaacacgagacttggcagggtcaaacaaaccgtatccaaaccatagcaaatatcttccctgtttctccttcgctttttaagcatatagactatagttataactgttttcatctctttgctaattttgacatctgtgttagtttgggttacttggaatttgttgattttactctgcatcatgggtgttatttacccatttctttgcataaatggtagattttgattagatgtcaaatgtaaattttgccttgttgggtactgaatatttctgtcgtcctatattctttatgttttgggggcacaagtttttggtaacaatttgccttttgggtcttgggtctaagaattattaggcaggcccagagcagtgtttatctagtatagagctagttaatccctactattaagacaaggccctcctgaaggccctccaagaagaattatgaggcttttctaatctagctgaggaagaggcactatgactggccccatgtgagtacttaatattatttattctctgtcatccttttgagtggttctttccctggccttagatagctttttcacacatgggtgctgatcagtattctgctgaatacttgaggaggaccctccgtggctctccagggttttctctctccatgcagctctctcctcaggtactctcatgaactccagctgcgttggtctccccagactctcagctctatctcattaattcaggaagttgctgggctctgcctgggttttccttgcctgctccttggcctggaaactctcagcaatcaactgggtgtgatcgtagggttcaacttggatcactgtccttttttgcttgatgtccagtgtctcaaaaactgttaattcatttctcttgggctacggataaatctagtccctgccatcctgtcttggctagaagcagaaggaagagtctggatttgaatcctgactctgctggttggttattcacaagctttgagataatctctccgggcctcaaatctcttcatctgtaaaattggctagtaagacgaattccttattgtcaggattaaatacaagaataaaatacgaggctcagaacaggtgttagttcatgtgagaaaggaagaactggccgggcgcggtggctcactcctgttatcccagcactttaggaggccaaggtggattggattgcttgagctcaggagttggagaccagcctgggctacagctatttcggaggctgagatgggaggatcatttgagcctgggaggtggaggttgcagtgcactgagattgtgccactgcactccagcctgggcaatagagcaagaccctgtcttacaaaaacaaaaaaacagaagaacctaggatcaagatttttaagatttgagcttcaaccattaggaattgagaagagggaaggatctaggaaaaaaaaaaacctcaagaaggaatggcctctggggcaagggagccaggctaggggatccctcaaggctgacaggagagaggaatttcagagagaggagggaggcagtgccagaacttgtaaggagacggagggtgaaggtgtctgtgttcacattctaactatagttacctttgcttcctgagtgacatttgtggctcacattggatctgagtgctacttcctctgcccagttgaagcagcttaattcagaggctaaagggagtttctgatctttctaactcagtttgtgaagccagttaaaataagaaagactgcttatttcattgggcaggaaaaacttgattatgtgaagcagtcaggaaatggagcatatggatgttaattacattttctggatcacacaagatcaaccagaaagagccttttgtgtttgtttcaatcctgttattggaaatctcagaactatatgggttcacctattgttagagctcaaggaagacctagagagagcacctaatccgcccttcttgtgtccttgatgaggagtctgaggccctaggaaatgaggggacttgctcagtgacatactttagtcatggcagagttggaactagaagccagattcggaatcacaggacccgtgttgcaggttgtgtctagatacaagtctcctgttcgggcacctggcttggattcctccttgtcaagtacctttaactttgttactttgaggaggttgttgaacctttatgacatcagttgcctatctttaacttgaacacagccttaactgcctgaaggcaagggattatatcagataactcctagcagtttcctccggatgtaagattagtgtcaggtgttacagggactggtcaggacatgtaaatgagtaatgtgtccaggtagaagttggtgggcagtggtgggctctgagacagactggaaagtgtgtgccccttccaaaagggatggctgctgctctgctctagtggatcgttgctaggtggcagtgtgggctcagtgttgccagatactccatctttacaaaaggaagccaaaaatctggatttttatgtgtaatatgtaatattcaaatttacgtattaagacacgacttaagacatgggacaaatgaagacatatctgtgggctgcatgggtgctcagttttagcctctgatcgctgtttaaatgaaattctgcagcctggctggtgtctaggaaagaactttggccttggattgcagggcacaggctgaatgactatggccctcactaaccagggggaggtcactttccttcccagtatcctggtttccccctcctggctctgagttatcttgatcaccaagagctactccagggctgcctgctgggtctaggaagtgaaaccccttctcttcctgatcagctgccctttggggagcaggaggaggcagcccagataggccttgcagggttccctttggtgaccctgactcccgtggccatttctctccttccttatgccctgggccacgcctgctgacccagtctggaataatctgctgcttactttgggtctctgctacttccctccaggtatagtcacaggggaggtcctaggctcattgtccctaataataatcccctgaccctttggttttagggttctagcaattccagtgtgggttgacacaggaaaaaagtgggcaagtgacagaggttcttgtagctttggtccctgggtcctccagaatgtggaggaaaggctgtcttaggacctgggaaaagatctggaagccattatagggtgagaggacgggggcacccacaaatgaggaaatggcagggtcaagttgggcgttatggagtgcccctcccttctccctgtctcagtgctgttaggggcacaaagatggaggttccaccctggaggagcttatggtttagggtagacgtgagggaagaagacatttattctttaaaacagaaaaaaagctcacagcaaactttccagctatgtagagtcatcgacctaagtgtagagaggatggtaataatggttggatttttatcccatgtgtttttaaccaatttaaaatctactagaaaaaaaatttttttccaggtagaggtttttactgcataccatctggactgtcgctagtggacagtttgtgggcagaacaggcagcccgctgaatgcccttggtgccagactgctgctaacttgtggggtccatggggaggggaaggccttcagggctttcagatccccaggctcaggcagaagcaggcccagctgcctgcttggtgcggggtagacgctcttctgcaaagaaagaacatgccctttgcagataggcagcttggctttgatcccaggcctgccactgcctaactgtatgacttgggcaggtgataaactctttgagcctcaataccctggcctttcaagtggtacagtaacagtacctacctcatagataggttgttgggaagaactagtgagcatggaaagtatcaatttttcattgccatgaaagcaccaatcatggcacccaggaagcttctcataaatgttagctgctgttatatattaactttttctccaccatgccataactgtatactctttcttagacatactgggctaggaaaggggacaggataccactgcgtggtggcaggcgcctgtaatcccagctccttgggaggctgaggcaggagaattacttgaacccgggaggcagaggttgcagtaagcggagatcgcgccactgcactctagcctgggtgacagtgtaagactccatctcaaaaaaaaaaaaggggggggacaggacagggacaagaagatgcagagatccccagagacaatgttggacacaggcaaggaaagagaggcgggggggaaacaggcaagacggaggagagaatgctcatattcatcaagtgtttgcatagtgattatctttctcgtctgtccttagggtagtggtttcacccccatcttgcatctgacaaacatgttcagagatgtgaaataacttacctgacacccaccttcagggctgggattctggcctggtctactgataccaagcctcatattcttttctttgtgccccagtgctggccagcatcagccaagggcaggggttgatgaagctggcattggccaaatgatcaggtggttttaaattggtttctcccaagctgtgttttacagatgttggtgtgtgtcttgttggtttttcttgtcttttctttcctttcttttttttggtgagccagttaggtgtcggtgttttcttcctatcaaaataggatctgggaagtcctgcagtaagtaataccagtgaccaacatttacatgtcatgccctgtgccaggtgctttacatacatacttcattttaatcctcacaataaccctatgaggtgcgtgttgttatcatgagggttattagtgagattaagtaatctacttgatggtggaggtgaaactggaagctagacaactggactccctaaatgaccgttgtaacttgatgtgatccagcatttcctaagcttgtttgactgcagagtgtgttttatcatgccttttacggaacacactttgtttgtattgtttaaatgatttggagcgtttgatattctgttaggttgttagttgtggggcttatttctttcatctttgtccctttcaaacagataaggggcttctttctttctgtctagaattttcccttgcagtgagtactgtactccctatgtgtttgctgatgaagtcagcagggtttcagactctgatttcctggtcatacacaagtacttattttaccatctctaaatggagtgcattagctccaggccagggagagcaaattagaggaacagggagatacatcacagagaaggaggctgctctggaaaaagctgtctgcacctctagcctgaactctccagctgtgtgggaataaatacagcaatgtcagggacagcgttccaaggcttttgcaggatgaggcccttgtcctgcaggtgagcctgcgacagtgtcagagcaacgatggacacaaaacagcctctgtctgggcttccaatatgcatttggtgcattttggtttctgataactttctgtttgcccatgctgtcccaggcaccctcacacagggtagagaaatgagagcctagccttgccctgccttctgaaactgcaggtgtatcaacagcactcattaggggaaggtattcttgaaccagcccgattagcacctctttcccattcttttttcccccccttctatctggggacttaggagagcaaaccaggtagctttttggttctttcatgtgtcagcatgagctttaaaatggagtttatcaagggcagagtttggaaactggatggaagaacattaggcagactgttttccttatggcacggggaactgctgatttatttgtagcaactaaatttggagacaacagacttgaggtggtggaaagagtcctgggctggaaacctgggtactagtcctggttctttctctgtctcactgtgcactgcggggtcctggcaagctgtgccgcctgttctggacatcatttttctcagttatctaatgaggggttggtcttcgttatctccaagagctcctcaagccccctctattcttgatgccatgatcgtaactcttacttagtcaaagtttggtgggatctctaatgccatgtggtacaaggatggtcactgataaccatctttacaggagaatgggtttctttgacactggtggttaactgtgttgttttgactttgggtcacccgagatcagacaagattgggcatgttcagggtggtatggccgtagacttgattttgggtcttttcttgcccatacacacagggcagatgacagatcacagatgacacccccatcacttcctccgtccagcagagcaaccagtggcttcagggccaggcatagttctcctggctaagggcaccctgaatatctgagtttattcactggcagaatgagccaggaggagctatctgagtgattgctggaggcaggcaaagtggggccccctcagccttgctcggctccctgcctgccagtagccctactgggaccaggctgctgagggttcttcagaatgctcacttaggctggagtcctggtgttgcatttgtgtgtaagtgtcctcaggacctcaggagtgtgttcatttgctttgttgttcacgctgagagtgggaaagcagcagccctcttccctcccagccctgtaccttctgttagatgacttcaaatgtagactctggggtcttcagaaggactgtagacactgccattcgtttagtgagagcatattattgggccctccttccctccatgcctgaatttctctatactagtaatgagtgtatagttatgacttcttggcatctattgaggtgccctgggctatttgcccctatactgaacgcccccagatctgggacaggcagacttgccgtcctcagcagcttttcagagaagtcgtgtttgactaggagaaaggaacgtcctgtctagttgtatcgaactgatgtgttctctaaaaatggtttctgtaatcactagctgttgcctcacagaaagggtttccatcctgggtgaacgtctttttgactggtctctgcttcttagggtatctgttctgtatccttcctctaaatagctgtttggaggggctaatgaagcaactgtctggagaccaatgtttatttcaacatggttggagttgtttttgcttcagctttcacagccaataaagctggttattagattctgtaattgctgctgtaattactctcttggaactggcaaaggcataattaaatatggagattccaaggactgttttttcccatctaaaagcaacctcttaaacttctattggcctggcttagatttcaattgttaaagccattgtgtttataaatggtgctgggggttctctggcagaagatgggtttctttagacacctcttttttgaatatttgatttagctgaacagcttctctttaactcggtacttgttttttaatctaaccatcaggaatctggaaaagttaaggcaaaacattaagaaccagtatatatttaatatttatgaaaacattgggttggttacagatagaagcaaatttctgtggtcagaaataaggttggcatggaggaagttttactaagtgtaatagtattcaagaagaatggcgttttacttgtggaagcactctaatacctctgagcctttagtttgccctgttacacctcaccaccggagccatgcatttgtaagatataggaggtggttcaagtgctgtgaatatttgtctacatctgtttctgcagcccagatgctgaccccatgtctattttcaaggtaactttactcatgaagcatgtttaggtgtttctgtgggggaaaattaatcatgtagcctttctctttggagttctaaactagttgagaaacacagacagcagatggatctagataagaaaaatcaacatcctggagagttcactgcgaagaggggaagaggctgtgtgaaccctgcaggcaggaaggggagtcctggggggataccccgggactgtccctcatactgtttgctcaggtcctatccccagtatgagagagcacaccttacagccaggtgcttgcgggaagtccctgttttatgggccaggaggaatgcagtggaaagatgctgccaaatgattgttctagcctgtgtttcagtaagacgtcaattctgtgggtcagaggtgcacgggagataaaatatgggtggatcccccatgaagaaccctggatagaatacatgaaaaccttgtaagacaaatgaaattgcaggttcaatttagtagatactaagcacttactgtgtatcagtcattgtgctggattgctgatctgcaaagatgaataatatcagcattatttcattcggggtggggatgggctcttggtttcctccctggtatatttgcgtatttgcttccagatcatttatttgggggattttagaagtgggaggtggaggtcagaggaagttagggttggcatacaaggagtcactgccagtggaaaatatattggagaaaaagcagttctaaatctatgatgttaatagggaaataactttggttttaaatataagaatgtagctgactgtataaaatcagtttcataagcattttaccaagctcctgctacactcgggatgctgaaaagcaaggcagctctgtcaaagagtgtttgctctttttttttttttttgagatggagtcttgctctgtcgcccaggctggagtgcagtgtcgtgatctcggttctctacaagctccgcctcctgggctcacgccattctcctgcctcagcctcccaagtggctcggaccacaggcgcctgccaccacacccggctaatttttttgtatttttagtagagatggggtttcaccgtgttagccaggatggtcttgatctcctgactttgtaatccacccgccttggccccccaaagtgctgggactacaggtgtgagccaccgcgcccggccgagtgtttgctcttatgaacggtctcagagtcacttgctgtcgttctgagactgtgaggaagagcatagagctgggagttacacagactactcccctcctcacttggcagaaggatgacttgggtgagctgcatcacctttctgatccccagtctccttgttcatttgggatctctggatgattaaatgaaataggaggcggaagggactgccgttgcttgttcaccatcactcagcaggctcttggaaggccttggtgaatcttttttttttcttgcccccgagatggagtcttgctctgttgcccaggctggagttcagtggcacggtctcagctcactgcagcctctgcctcctgggttcaagcaattctcctgcctctgcctcccgagtagctgggactacaggtgcgcgccaccatgtccggctaatttttgtatttttagtagagatggggtttcaccatggtggccaggctggtcttgaactcctggcctcaggtgatccacccacctcggcctcccaaagtggtgggattacaggcgtgagccagcgtgcctggtatggaaggccttggtgaatcttaatgatgggctggactgtgggtgatggagctggctggaggggagttgagaaaggggcacctgtgggacattggcacttgatctcggaaggattcacaatcacttggtgattagagtatgtctagggtatggcttttgtggaaaaggaacacagcaccaaggaagtcacaggaagcaggcctgcagccccacgccctggggcacttacaggactctcccaggacctcttccctctgacattactgatggcaaaggcggttctgtagaccttgtgctagggctcccaggacttgggcttatggagagaattctaacgtcttgcctctgcaggaccgggcaggccatattaaaccatatggcaaagggagctactgaggatttttcagcaaaggaatcgttggatttgcattccctcttctgtgttcccacagtccccatgtcacttcctgcatgactggacgatccctccagggcagtatcctacctttttcattaagtggggggcataacataatggcagggcagggactttggggttccatacctggtttaagtcccctctctgccagttacctgggctgagtcacaggacatctctgaacctcagtttcctcatcaactaaccttatcatctaaccttaaagggttgctattttgaggcccttatgaagtgagcatgacttagtgctaacagaagatgagagtgaaggtcttgaggatcccctggtgtgactgcatgatgggtttcttgaagtcttgggccattccagccaacatcagaatcaagggagattacggattcagtggcttttcagattttaatgaggcacatctcattgttgttcagatgttttacgagttctctttatgtgtgtatgtatgtattttggtcagcatttgttggaaagactggctgggagaagttttctgctgcttttggaggagctgtgtgctatacgcaggccaagccgttttcccttggcaaatggtccttaggacggaatcccaggccaacgggtgtgagtagaaggagcatgggacctattcatgtgacatatggagaaaccacagcctcatgggggagggggttttgacctccagtctgcaggagatggctgtggtccagaactccaggacatgggggagtgtgcatgctgagtgcatgtgtgtgtgaggctagtgctcctgacccagcccagtccagctcagccatttcttctgacagagtctgtgctaagcctccttcctagcttttgatgcccattgcaggggagcaaaaaatagcttcccttctagtttctttggctgggctacaaactgaattgatataagacagattaacaagagaaaaaccatatttagttacatatgtacatgtggaaatcccacaaaatatgagacttgaagaagagtcagatgcttgaagcttatatagcatcctgagctatagaaaagaataggggcttgggggttgttgtgggggacataacttatgggagggtgaggggaagaattacttatggtgaataaaggatgtgttgttatgcagataaaaggtctcttaggtaataaaagttgtctggagcagccctcttcctggcacagatacttttagtaatgtagattttcttcttagatgtactgtttttttttttaaacaaagggacagctttttgagctactctagtttcttagaataaccagctcaaaatatgccaaagaagtatattttgggggtggtatattctggtctcctacagtcatattttggggtggtgtgtcctgtgccccaacatcatctaagatgtgtgctaaagatatttttcggtgtgaagagtggaactgagaccgtgaggggaaggaaatctgggtttcaagttgggagatgtggttttggtcccagttctgccacagattcaccttggtcaaattgcttgccttgactggaccttaacatgaggtgatctccacagcctcagcgtgctaggaggccaaggtagatgatgccactgacccaaccaaatggccagactctaggtttggccgtggcaaggagttctgtctggctttttagtttggtcttgttttcgatgatggaggatgctgtagtagccatcttcaggcatggggcttcttgcttttgaatacatttccagaaggaaattactgggtcagaggataagaacatcatgatggttgttgctgtgtgttgccatgttacttttcgggagcattgtaacaatttacacagttgttggctatgagtgaaatagcatttttaacccaaactgatctagtatttgatatagtcattatatttatgatttctttaatttaggtggcataaaatagtactttgaagttgctttataataatgggagccgctttttttgagaggcatacacactgatgaatgtgccaggtgtttacatacagtatgtcatttgctgctcacactgaccccatctgggaagccaagtagctcacctgagtctgtgagctgggctttgaccctaagggagtttgaccccagagcatcttcttcctcaggtggctgtccatgctttgatttgtgtgtgtgcgtggttacccgagggttgaactttggcttgtgtgcttgtttactggccgtgttttgaggtatgtgaattttatgtttttgtagaaaattgaatgtgctctttgtgtagaatttatgaatcctctgctatagtggaagcaacaacagaggtgcttccagtagagttggggaaaagactcagtgacactagaacctcaccctgtgccgggactctctgaaaccctgttttctccctcacgcagcggccctccaggcactgaagcgtaagaagaggtatgagaagcagctggcgcagatcgacggcacattatcaaccatcgagttccagcgggaggccctggagaatgccaacaccaacaccgaggtgctcaagaacatgggctatgccgccaaggccatgaaggcggcccatgacaacatgtacgtgtccacccgcccctgcgccacagggcagtgctagtcccggaatgcctcgtacccaggccatggccttgggcagacggatcccttgacttacctattcgagcacctgagtttgttttaattctcattcttttttggaactccgaaaatggatgacgtgcctttgaaaggagatctcatgggatgtaaaagtactttctgagtaattcagggttattgtgatgagcatagtttcaagctggaaaggcctttagaaggtcctcttgtccagacctgtgaatgtgaaggtggggaagctgtgtcccagagagggaagcggatttgccctgtgtgacatgggagcttggttagaactgggattagaatcggtgcccatgatttttccctgatgctgtcaggggccctgaaatgtgtggttcatccaagagctttggatctctctgttcctatgtctgcttttgatggcgttttctgcctcctctcttgctctccggctgtagctgtcattgacagtgatcttgccctcagcagtccttcttcccctatatggctacctctcatggcagtggcctaagaaactagataaccaagcttgttacagttgtaactaaaggccaaggtaaggaggctccaaatgaaggcctctctcttgaatacaatctgcatttgggctgggtgaggtggctcacgcctataattccagcactttgggaggctgaggcaggcagatcacctgaggtcaggagttcgagaccagcctggccaacatagttgaaaccccatctctactaaaaatacaaaaattagctgggtgtcgtggcatgcgcctgtaatcccagctactggcggctgaggcaggagaatcgtttgaacccaggaagtggaagttgcagtgagccaaaattgcaccactgcactccagcctgggcgacagagtgagactctatctcaataaaaaaataaaaaataaaaaataaaaaatctgcatttgttgtagtgcttagatttggcagcatatatttgggggtgctaggtgccttttttgcttccttttgggtactcagctgtgctgtccaatgggtgggaaaatgcaccctatgggcttgccatctgtttttgtaaataaagttttattattatttgagacaaggtcttgctgtgtctgtcacctgggctggaatgctgtggcccaatcctagctcactgcactctcaaaatcctgggctcaagccatcctctcacttcagcctcctgagtagctcagactacaggtgtgtgacattatgcctggctaatttttaaaattttctgcagggatggggtctcactgtgttgcccagactggtctcaaactcctggcctcaagtgatcctccctcctgggcctctcaaagttttgggattacaggtgtgagtcactgtgcctagccttaaaagttttattgaaatacagtcatgccccttaatttacatattgtctgtggcagcttttgtgctacgcagcagggttaagtatttgcaacagagactgtctggccataaattctaaagtgtttactgtctggccctttgcagaaaaagcttgctgatgttgctctagaaatgtgaggttgcaggagaagtagccttcaaataagtgaggttttgtctgagggtggatgttcattggaccgagctgcttgaatgagaaccatatatgcctcatttctgtgttctcctggaaacctagcagagtgcagctcattaaatactgtgcaaatgttgacgtatatgtgtgtatgttggcttgagtaaatataggtttatatgattgtcagtgtgtagaagaaaattctgcatatttgcggaatttgcctttcctttggggtcctagaggatccataggtggactgagtagatggaaggcccattagacagcatggctgtcttctgtgatttgtgcttttacttccccctgtacagagttacccttggacttgaaaaagagctattggcccaggagttaaagccctgcggtcttaatgtgatacctttactaatttgtatgtaggaccttgatagtgccacctgtagggtgttggactgggtagtgtcttaaagacattcccgtccccttgagtctatgattctctattttaaaggggaggaggcaataatgccaagtaacccctcacagggagtcattgcagggggtgtggctgggaagctgattttgtggggcccagtttctgctcccgccttgccttgcaggccccctttacgcagcctaatcgattgatatgatacctgtccattgcatttgaagggacatcgataaagttgatgagttaatgcaggacattgctgaccagcaagaacttgcagaggagatttcaacagcaatttcgaaacctgtagggtttggagaagagtttgacgaggtgagtagttttgtacagatcccataagcttcacaaatgataccctgaggctgtcccttgatgtgctcttgaaggctctcaggcagggagcatttggacttggacagagacagggcatggtgttaaccctccctgaattctgcattttgagggacactttctctatttggggtggaagcttaggtagagtaaaggcacattcatcaggacccttcagcaggcttcaggtcactaactgatttgaacaagtagctagcctgcacctttccagggtgggccctggcacagagctgggcagcagagatgaccatgccctggagaagttcacaggattttccctgagacagcttcagcatgagggaaaggtagagcaaagagggggcacttacccctgacccggggtatctgtctagatctcggccatctgccagtttctgctgtagcaatttgggaccttgagtctcttaggtttttaaagtatggtaccagcccctgttgaaggtatttcactgtgtgctagatttgtgtctcctgaaggttaggtcctttctgctggacctttgtgctttctgacccctgctgtataaccgagaaaacagcgtgcagctcttacctttggctctcaacaccagggttttcatgttttcacactggagttcgatggatgaatcgagttcatttcaaatcagcaaacatttctgagcattcactcgtgtgcccagctctgagccaaataaataggaaggcaaagatatgatcccctctcccagatgctcacagtctagtgcaggacaccagaggtctacatcagtgatgtgcagcagtgatacgttccccagtagaagctgctttaggatatttgaatcacagggtctggaacctggaattcacctccccgcagaccttctcagaggggtgtgtgtctccatgagcattaattaggtaggaggcatgaccgcgggggctgggattcccagggagggcgctcactttgtgtttccttttactaggatgagctcatggcggaattagaagaactagaacaggaggaactagacaagaatttgctggaaatcagtggacccgaaacagtccctctaccaaatgttccctctatagccctaccatcaaaacccggtgagtgcttctagagtcatggcacaccgtgaggtcatgtggcaggtgatcttgtggtcggttggctttggtttgtggtcggttggctttggtttgtggtcggttggctttggtctgtgtcctgagcttgcccaagattgagaaccagacaggatccattgtagtggccacagaggccatgtcacctggctttttctggtttctctctggaacagtgtttcttaatcttgacgctgtggacatggccagatacctctctgggccgagagatggagggtgggggcggggttgtccggtgcactgtggatgttcagcaccatccctggcctctgctagatgccagtagcaaccgccatgagttatgtcaaccaaaaatgtcttcagacatggccaaatgtcccttggtaggggttgggaggatcacccccagttgagagcctcttttctagaatgattttcctatttcactaaagaagagaaagttccaggcactgtgagaaggtgtgagagcgtgagtccaggacagctctttccctgcccctctagtatcctgtgctgcgcaccctgcaaaagccccggcccctagagacagcccctgggggaaggaaacagctttgactcctttagagacctgattctataaaaccttcatttcctcccttcatttcttcccttcccccatcccctcgcacaatatttcacccccaggtagaagtaatccacacagaacttctagaaaaagcgaggcaatttgatgtggcatgagagagaaccctgggggcagtgcatgaccagctgtggtcacctccctctcccatgtataaagagggaacggcctcctcaagtagagtcagctgcctagagtcctgtgtaggcagaggccgtccagcaagcctcctggagctgtgtggccatgagtcaagccacttgaggtggagttgggggttggcaaggattagatctcttctggggttcttcccactctcctcccaccttgcaggctctgggaccgaagccttgtgggaatcctgagggcctctgtgtagaatccttgttttgtctgggcctgctggaggcggagggtgggtgctgccaaactgtgcttggttttccagagttgtatgttgcagcttttaggcaccaaggagcagtctccctacagcctggagaggagtctggccacagggcagggctgtttgacagacaccatggagcacaggcagccctcatttccggccagaacatgttgaacgcaccagtcatcctaaatagccttttctgtcttcacacagccaagaagaaagaagaggaggacgacgacatgaaggaattggagaactgggctggatccatgtaatggggtccagcgctggctgggcccagacagactgtggtggcctgcgcagcgagcaggcgtgtgcgtgtgtggggcaggcaggatgtggtgcaggcaggttccatcgctttcgactctcactccaaagcagtagggccgcgttgctgctcactctctgcatagcatggtctgcacctgggagatgggcggggggaggggggcgggcggggtgggaagtgcctgctgtttataatgttgaatttctgtaaaataaactgtatttgcaaatccaacattgagcttctggactacgctgactccactgctgaatcctcaatggaaagggtcgactggttgcagttgaaatgacctgaaatgtagcctctgtccttgtaagtcagttgacttgccgcacatctctttgtgtacttgtacggtactggcagaaaagtcatttttcaaaagccataggcttttccttgcccttagctgtaataatgcatctgattttgatttcctccagagctgtgtttctgtccatcacctgtgtattggccctgtgtttaccactctggcccactcctcacccccttgctcccctggtcttctggagtttgtgacattgatttgaaatggatggtgttctcttgagagcaagtgagattgttagaattaagttccaactatacagttttctaacatagctataaggtccttgttgctgtttgtgataactgatagataactcattggaaacgtgcatacatttatattcagatgaaattatggtttgcactgtctattaaatatctcgattaattttcatactttgctgttgtgtttaatctatcatttgcctcgggagctgaccctttccagaccagcaaggtgtacagtggagtctggaaacatggaagacttaaccatgacatgtgtcaacagtttgaaccaaagagcagagcttgtctcaccagaagtctgttcaagtcctagattggccctcaccttgcctggggactctctgggtacagttcagggtgagttggttcttgggtacttcagggtcttccctatttcttctctgccagtgtccatgggcagtgccagcaggagccttactgttggaagccatggtgctcccatcagacaaggctcatcaggaacattgaagaaatggcctttcccatggggaggaagtgtagggcactgactgagaatctaggacacagaggtcacctcaggactgctgagactcaacatatgactctggcccagccccttccactctgtccccttttctttggtcttgtatccccttgagagtgtgatgcatgctgtggaccctcttcagaaaggtggatctctacatatttatccttaattttgcatgcaaatttgcagtattgagaggacacccctgtccccctgtgctcactcccaaaccttttaaagtaaaaccaacctgagttcaaaatgagacaccatcattgctcactgggcgccctggggcaagttgcctaccctccctggggctcctgttctcacctggaaagcaaggggatgggaacagatcagtcctgaggtcctgtctgtgttgagcggctcatgccctgtccctcatccctcattgcggcatcccagggctgccacacttagaactgggagggacttgaagacagtggcttaaaaattcctgacttgtgtggaggttggatctggctagtctcagaagttctttcacctcaagacaaatctagtggcagtgcttgctgccagcttccacccgctcagcctgcagctggtgtggcctctgggtatcgctggtgtgggagacctagtggactttcttttttttttttggagatggagtcttgctctgtcgcccaggctggagtgcagtggcgcgatctcggctcactgaaagctctcctcccggattcacgccattcttctgcctcagcctcctgagtagctgggacaacaggcgcccaccaccatgcctggctaattttttctatttttaatagagatagggtttcactatgttagtcaggatggtctcgatctcctgacctcatgatccgcccacctcggcctcccaaagtgctgggattacaggcgtgagccaccgcgcccggcccccagtggactttcttaagctcctctcatcagctgttacagggcgtcttgccctaggtctgtgtgaggggaacttgcagactcaaccctccagctctggtgaacccagaagccaggtccagggcagggtctgtgactcctctgagcaagagctgcttatttctaccgagtgtgggtcttgtgccagggcctgtggagtacagtgttcagtaatacccagcccctctcctgttctcaggaggttcttggggccagagagagaagttactgagtcaggattccttggctacaagcaacagaagcctcaacccactggtataagcaatggagacatttacttatttatgaaaacttagtcaacagatatttattgagcacctactgtgtgctaagtactgttcaaggtgccaggagtacaggtatcagagtccctgccctcaaggtggttacagtctaacaatctcaggacaagaaatcttggtggtggggcgagggggtggttctggatttggggtagtggctgaaccatgtcctcaagaaccaggttctttgcatccttctgctctggcaccctgcacacatagaggctttttcttttcttttttttttttttgagacagggtctcactttgtcacccaggcttgggtacagtgctgtaatcatggcttactgcagcctcaaacttctgggctcaagcaatcctcccacctcagcctcctgagtagctggcacacgccgctactcccagctaatttttaaattttctgtagagagggagtctcacgatgttgcctaggctgatcttggactcctgggctcaagcgatgctcccacctcagcctcccaaggtgctgggtttataggagtgagccaccacacctggctggaagtcttgctgtctcttggttgtgagatggcccttcctcacatgcgcagtgtcaagaagcagcaggcccagcacccgccagcttttccttcacctgagcccatgttaacaggccaggtttccccagagtcatcttacaacttgtcccttatgcctcatggaccataactgtcacattgccacttcttgctgcaagggagtctggaatgtttgtacgggacaaaagggacaaatagggctctcctgtagggctaggggtggagcctcccttccctgaatatattaatgtccacttacttgatgctgaatagaattgggcttctgttaacaaggaagaaggagggatagttgctgagtaggtggcaccgacagtgtgcaccatggaggcagaaccaagaacataagacacgtatgtagttggtgctaccagtttcttccaaaaagtggatctgatcgtgacacttggtcctttcgaatccctcagtctgcctccatcctctcctgttctgggcagactaaaggtgcgtcaccattatccaaggagcttgtgaaaaatcccgagctgggtggagactcaagaattgcattttcactgctgggtgtgcgatggctcacacctgtaatcctagcactttgggaggctgaggcaggtggatcgcttgaggccaggagttggagaccaccctggccaacatggtgaaacctcgtctctactgaaaatacaaaaattagccgggcgtgggggcacatgcctgtaatcccagctactcgggaggctgaggcaggaggattgcttgaacccgggaagcaggggttgcagtgagctgagattgcaccactgtactccagcctgggcaacagagtgagactctgtctcaaaaaaaaattgcattttcacaaactcctgaggtaattctgatgtaggtgggctggagcccacactcagaacactcaacgtcgacaggatcaagtcctcagaatggctaacttgacctcatgacctggcccccattttcatttccctttgaaccccaaatcctgttacccagacttccctgtctcttggagcatgtgctctgtccctgtggcccttccctcctggacacagccctccctgtcctgcaaaagctgctgcttcctcctctgctgcccacctgtcaacgctgtctcttcatcatttcccactcccttaccagatggcgaggtcactgtacttcctggcccctaggtccacctggcacagatcaggtacgaagacatttatgtgaacaccggtgtggtggaaagtcagagggaagtactgtcgccagggtgtgccaggaggaggtgggatctgagcttgcacgtgaaggagcagattttccacgtatgcctgtgaggcggagcaccatagaccaagggaacctgctgagggagacacggcagggaggccaggggctgccttgggaggagttggctgggggaaggggcttgcttggagtgggtgggaggtagaactgaagagggaggctggagctagatgggatggagggcatgagactaaggcaattgcaggcaggcaggaaaggacgggaggaaagggaaggaggaaggaaagaagggacagaaaacaggaagaaagggagaaaggaaattaggttctcaggcaataatttggggccaggagaggatagagatgaaacttctaaggttgccttccatttccctcagtgatgtgaagacagctttgcagcagctgtgatcctgtggagtcaaacctcactgctccaagtagggacgacaccaggcaggtgtgtggccaggccacctcagcagcctgtaatgtggacacaccaacttcagttaaaacagcaaatgtattttctcacagttcaagggatcagaagtccaaaatctaggtatcagcagagcgtctggtggaggaggatcctctttggcccttgtggcttctggtagctcccagcattcttgggtgctccttggctggctgctgcatcgtcccaaactctgcctccacctccacatggccttctctgtgtccttttctgtctcttacaaggatgcctgtcattgcatttggagctcactctaatctaatatgatctcattgtgatcctcaccttagttacatctgcaaagactccatttccaaataaggtcccattctgagggttcgggtgggtgtgaattttgggggacattattcaacccactctagctgtgagctgggggcctataagcccgcagcagggtggagagagctcagtggggcagacacaggaagcacaggtctcgtgagccccatgtgctggatgtgaagcccaaggctcagagaagctccagggcccactgctaatcagtgacagtgaagaagccatgggttccttagcttgtgaaggccattcattcattctacaaacatgttttgggtacttctatgccagctgtctggaagctcacagtttggtgggaaaattagaaaggccgtagccatccacttcttcatcatcatcaccacaggctgggtcctctctgtagtgagtcccactgggaagagggttcctggctcaggagggtttgtgggaggacatgatatctcagccaagatcggaggctgatgaggtctcagcaggggaaaagatgtaacaatagagaggtcggagggtcgcgttcaatgcctgtgcaagaaaggcctggagccacccttggcctgcttgtgaactccagatgaaccatgacacacagtcaccagacctgcagtaaacatttacgaaatgaaattacagatgaggaggccgaggcgccaaggtgcttccaagtgtcacagccaagtaccagcagagcaaattcatgaacccagctcccctgtctccccatccatgtctcttccggtctggcctgggcaccccgtctcagaaactgcttccttccttcctgctcagctgtatgctggccttgcccagaccgcagaggagccaggtggagctgggttagacacgcaagactttgggtcttgcagctgagactctgcaccaatcccaggctagatttccatgaggcactggctaaactggtccaaattcccgcagagtagctctgagggagaagcagaggagaaggatcccccttcagagtagaaacatttagggaacatacacgaagaacagacaatctgtaccttctcactgaacccacacaagaactatttcagggcagaaccattcgttaccccattttgcagcagagaaagcccaggctcagagagataaagtgatttgtccaaagccacagttgtggagtcacaagaatccagtcacacacatacctcctccccaggccttccctgctgctgtggtgggggaggagccgggtcacagagatgcatccctgactcccttagaaggtgttgaccctgaatgtgaccaaaccctgggattttagaggccagctctctcccatggccacttcctactgacagtgaaaaggccacaggcaacaggacctgggatcacccagggtcacctggaatggagcggcagggtcagccatgcagaagagttggggctcctgtcttttccacaaggggctgatgaggggatcccctctggggctgggtctcccttcccaccctgaggacctgtctgttttcacccagacaatctcactgattgtctgacaaagtaaagaagcaaatgaattacttattctatgaaagccattcattcaacaattttctttttttttttgagatggagtctcgctctgttgcccaggctggagtgcagtggcgcaatcttggctcactacaacctccgcctcccgggttcaagtgattctcctgcctcagcctcccaagtagctgggattacaggtgtgcaccaccacgcccagctaaattttttttgtagttttagtagagatgggggtttcaccatgttggccaggctggtctcaaactcctgacctcaggtgatccacccaccttggccttccaaagtgctgggattacagcgtgagccactgtgcccagccaaacaaatgtattttggttgggcctggtgggtcacgcctgtaatcccagcactttggaaggctgagctaggaggatggcttgggcccaagagttcgagaccatcttaggcaacatagcaaaatcctgtctctacaagaaataaaaaattagccaagtgtggtggtcgtgcttgtggtcctggctactcaggaggctgaggcaggagggttgcttgagcccaggaggttgaggctgcagtgcggcaggatcatggcactgcactccagcctgggtgacagagcaagaccttgtctcagaaaaacaaaacaaaacaagtgaacaaaataaatacccaaagaattttttgagtacttctatgcccgctctcacaaagctccttgtttggtaggaaaattccttatctccctcctcagcttgggcgcctatgtagggacacttggttccctcatacaaagcgtggacagacatcagggtacatactcattgctgtttcgcttctccattgctgcaagaaacccgcccctgaaacttagttgtgaaaagcaactattttattttattttattttattttattttattttctgagatagagtttcactttgtctcccaggctggagtgcaatggcacaatctcagctcactgcaacctccgcctcctgggttcaagtgattctcatgcctcagcctccagagtagctgggattacaggtgcgtgccaccacaccgggctaatttttgtattttaagtagagacggagttttgtcatgttgaccaggctggtcttaaactcctgatttcaggtgatctgcctgcctcggcctcccaaagtgttgggattacaggcgtgagcacccacactcggcgcaactatgttattaagctcacagattctgtggtcagaaatttggaaagggccagtggaatgatttgcctctgctccgtgataaccgggaccgcacctgggagacctgaagactgaaatgacctccatggctggaggctggaattatctggggacctctccagtcagtggtgtgctacgtgtggtagttgatgctggttgttgactgggacgtgccctggggctgtcagcaggaacctgagacctctccatgtgacttgggcttcttatggcgtggagacttcagtgtagccagagctcagggctctaaaagtgattgtcccagctagcaagggggaaggtgcgtcatcttttgtgacctagacttagaagtcatgcagaatcacttcactgcattttactggttatcagtgagttgcaaacccacccgggattctaagggagaggaattaggctccacctcttgatggggacatggctagttctaaaagagcttgggggacaggagatattactggggctgtctttgggagctaaagtctgctatgatagctaacacagagcatttagtatatgccaggtattgaatgaactcatctggtctctgaacccctatcaaaagaatatttgtgagtatataccatatttatttattaataaattatataaatgtaccactgtactaatatattgtgtaataatacacaactccttgaagttttaaaagcctaggatagaaataattataataaaaaatttcaatgttttctttctgtattcctaaagagtttaaggatttttttatttttttaattttttttgagacggagtctcgctctgtcgcccaggctggagtgcagtggcgcgatctctgctcactgcaagctccgcctcccgggttcattccattctcccgcctcagcctcccgagtagctgggaccacaggcgcccgccaccacgcccggctaattttttgtatttttttagtagagacggggtttcaccgtgttagccaggatggcctcggtctcgatctcgatctcctgacgtcgtgatccgctcacctcggcctcccaaagtgctgggattacaggcccgagccaccgcgcccggctggcttgtgtttatttaaggaatggaagcgttcactcaagccagacttcaggggcaaatgtacattgggaatctccaagggacatctcccaaactacctgaccagggtgtgggttccgccgaatatcttttgggaaacgctgtgcgggggtccctagagcgtgtgggtcctccccatccctcctcccgggtttgaggggccgacgcggcagcgcgcccaggggcctgcaggtggcgccatgtcccaggctgtggggccccgctcccgtcgaaccacggggagaccgtgggctcctcccgggtggtctgcgcctggcgcagggaggggcctagaggaggcggtggagtggggcggggaggggtgtctgcttagcatcgggcgctgctcccttgccctcccttgctttcccctctctccatgcttcccactccccctactgaccccctcactccttcgtcccccgcctgcccacagggacacccccatggatagggagagggctgtgtcctagctcctgccagagtctggaggccgcgagtctagggtgtaggagaagggggccaagccagccaggaggtggggccattgtaacaacaatcacagcaatagtcactatgtatggaggcccactctgccgtgcgggggtggggagctgcagttgtgggctgctagctcatcttctaggcggtcttcctgttccaggtccctctgctgcccccaggagtccagcaaagcaggacagctctgtggacatggatacctgtgtgtcccccacccccagccctgcatctggcttagcgggaaggcaacccgctcgtgggagggtgggagtgggtcccaggctggggacttcacttgttgccctggagctggttctccaagagcacagaccctaaaccactgccctctacttccctggtgagctccccacccccataccttaggcaaatttccttttccaaccccactccaccaattttctctgcctcctccttctgtgaggtttgtgggcccagtgtggcctcagggggctgaggggatctcatggagttgagcctcaccttgtccagtgcccagcaaggcctggggaggggtgcccagaagccatgtttttgtcatactgccaaggaggaccttggatgcacttggggaagcgctgatgaagaaatgacttcagaaaaaaagaccctgatttgtaatctttgctgatttccatgtaaattctcttaccgtggccagcttcaagctaccaacatgacaaaacatttcttaacattcagccattcctgtggtccctggaatatgtggagaaaagaaattgaaccacagcgtcccggacctggtagaagccgcctccagcacaacagtgagaaggtctgtttaggactctgcttgtttcagaaagatcccggctttgctttggtcaggatgggctacatcactgaggggcccagtgcaaagtgaagatacagggcccctttttcaaaaattattcagaacttcaagacagcaacaatagactgttaaaccaagtgtgtggcccttctgagtgagggccctgtgtggttgctcaggttgcacacccatgaaacctgccctggctctgttccaggccaccaggatggcttgcctgccaggacctcctcactggccttcctgctgtctccctggcctcctacaaaccattctccactcagcaaccaggggttgctctgggctggatcttgtcactcctacacctgccgcttgtccttgagagcaagggcaaggctcctctgcctggcctggttctgagacactgggctccccagttacatatccttatagctccgcacacatgtgttcctgcctggctctcttccctgtagaaactacatttccttgtatgatctctccctttataccatcagcagtgtagtcctgtgctcagtaccgctgcaggcctgcacttagtagatactcaggatgtgctaaattgaacaaaatgaattaattgatgaaaaggacaattggatcaggatagggctgttccaaatgttttctggcaacagactcatttcatcaaatgagatcttacagggaagcccacgacatgaaacagaaaagggccgctgctttgcctgcaatgggagggaccagacgcctgactccggaggccatgcagtcactgcctctgcagaacctggtttggcggcaccaacattgccactttcctttgttcttcctgcatttaaccttagccgacccctcctggctgacattgacgatctggtttctgttcgtattagccggactgagaactttagctgtcacgttggttgtacatgtggattatgctcctgtctccccttctccctgtacctgcggatcactcggccatcgcttggctctgagaacagcggctgggctgagccatgggcagaggatttggtgtcctttggggaggggtgctgatggtgagcacaggggcagggctgcagtgccccccgcccccagcacagccaggctcccccactcccctccactttggtcaaatgaccttccgtggccaggggcgaggtgctccctctcactgagctctaacctcgcttgaacacccaccagcatttattgagcgcctgctgggtgccagcatgttgccaagggctacctgggttttatttccatgggtcctcacgacaactcttaggaatggctgttatcatattccccattgtacagatgagaaaatggaggctcacagagggagaggacttgaccaaggccacacagcggatgattcaaacttctgacccaccctggcccacaatgggcagccgagctagagaccagtactttatggatgaggggagaaagaggaaccaggacctcatgctgcttctggtggcctggctgcatcctctgaccctgggacgcgctcctggctcttacctgggaggcagcatagcaggtggcattggaagcagaggggcctgagctagaatcccggctctgtcgctgaccagtctggtgacccagctatgtgggggtctcaccagcctcactctcctgcctgagcaagggaagcagagatgtcagtacccacctgcccgggtgggggcaggtgaaggagaggttgtcttggcacacggcacatctgaacactcgctggggtggctatgaggggtcctcacgctttacccaccttgggcccatcttagaatgaaagaaaatggaatccccaaggaggtctctttcctgtccttcctcagtgcatctcagagttggaccctgaggggaccctctgcttggggctgtcctgggctgggcatcctcccctccctgctcctgatgtaaaaactccaagggtgggtgccgcatgaggagggccaaggtgctgcgttctagtccttgcctggccaccggctggtgcctagaccctctctggacctcagtttccccacctccagcatgggtctcctgcagagcccgtgaggcagcagaggatggatttgagcctggctgtgtgcggtcagggcacctcccatacgcgagggggtggatcagtctcctggggttgctgtgacaaatgaccatgaactcagtggctgaaaacaagacacacattcgctcacaagcagtctcgtatcaaggtgtcagaagggccacgctcctgcagacgctccgggggagagccctgccctgccttctctggaaaagatgcagcgatccctggcctttctgggcttgtggcctctgatctctgctctgtcttcaggtctcctctgtgtgtcttctcctgcctcttataaggacatttgccattggatttagggcccactagggtaatccaggatgataccatcttaagatccctaacttaattatatctgcaaagactcttttcctaaataaggtcatattcacagcttccagggatttggatgttgacatatctttgggagctatgacagtcagcctcacctcacaggctccctaccagagaaaggcaagtgagggccagcggattcctctaaggaccttggagagtgccgcatacagtaagctcaacaaatgtgaaccctaagaaagagacatggaggcacagggaggaaaagatcacggaagagcttgccctggccatgctgagaccccttccccccagctttgggccttgtctctgggggtgggccaagccggacccctccagggcagggcggcagcacacaccgccagccctgcatctctgcatcccattctggcagagcactacccagaaacatattttacccataaacgggccaattaagaaggcaaatgttttcaaacaggaggatttattggcatagaatgtgccatccctctaagcaagaggagtgggggtgtgtgcggagccatctggaggggagttgtttatcatatttatttagttacaagttgctggtttagaactggcagagctttgtgaggtgggatcgcagttccctgggagggcacaggctcgggtggctttgtgcacaggggtatgcccgtgtctgtgcagacacgtatgtctttgtgcctgagcgtatgtgaccgtgcacctacatgtgggagtttgcctgcctatgcgtgtgcataccctttattgggtctgctctctgtgtgtacacacatgtgcctctgtgtgtacacatgagtgtaagagggcctagagatgtcctggtgcatgcgtgtgcacatgcgtgtttgtgtgcatgtgtgtgcaattcttctttgtgtgtggatgcaggtgtggccttgtgtgcacttgcctgggacagatcctaccttacccaatttgacttccaggcagtcttggacatctctgagagtctcttccctggcaatttcccacatcatcctctttctttgatctctttctcttccccgtgtgtcttctcttctctttctagaccaggggacaccagtaggtcacgtgaatgagagaagaaggtctggcctgggctaggcctttgatgcagactcattgtgtgtggcaaaggtaaaggaattgtcttggcctctgcaaacatacatgctctcctattttacctaaacacgtggctctgactctctgagactactctgtttctcagcatctgatagagatatgggacaaagaatcattacaagtgccatgatcgccaacaagaactacttagcctgtggttctgggagccaatagacaagggtggggctgtggtgaacaggagagtgcgtgcccctgtctaagggacagccaatcctcggtgatggttgctttgagaaatttccagcctctgttgccaggtcttctgagtttctaagaaaaaccagagatttgtatttttaagagagtgtgcttgatttttaaacattggctcaaagatttttgaaacattgcaggccaaatggaacttgtgtgcaggatgaatgatcagggtgctcatctgcagcctcccccacgctccatgtgcacccctctgatctgtggctgtagggatcattgtcaagctcatgaccaacatctgtgcctcgattttgggtctagacccactatgagtcagaccctgtcatcctgggctcatgtcttgtgagcacaatgaacccagcatgtccacgaagcaaagcagcatctttcctccatcagtgcctcccttgagtccccgaatcagaggcagccccgccatcagctctggagatggaatctgggtgtcatccttgggtcctcaccacccctcagcctccgtgggcattgaatcagtcacccagtcctgctggctttgcctccagcacacatctctacagcctccgtcatctctctcctgaatgacagtgacagcccgctccagcttctccaggcttctagttgtgtctccctgctccttccctgtccacctctccagccttgtccttccctctccctgctggcactttaagcttcagcaacaccagactgcttgtgttctattttattgcctcttgcctttgcaatgacgtctcctcttcatggaatgcctttccaggcctctccacttcccccgactaactcctctttatcctttgagatcccataggaagctccctctgcaaaagggtgataaataaatctcacctggcaaggttgttctcagactgcatgaggtccttcctggcacagtgcccagcacacagtaggtgctcacttgatgtgcctgcctccccgtccgctggcctcccctgcctgccactctctctggagggaggaccgtgggcactgactgggccctgagggatgagacagagtagcccccagacaggtgatctcacagccttccccaggcctggacccggtgactctcaaatgacatcagccacggaacttcaccagcagatcaggtgggcttttccaatcagccctctcctgttaaatgggcattttgatattttcactggatgtacattagtcacggagaattctgatttgcacagcctgtgttttagagtgtgatgttctaggctgtaaagataatcagctctcataagagatagtttccctggtgccaagggtgggggactggggtggcgacagcgtgattggaactctaaatgtctgaagtgactgtctcaagtcccctgagccacaattcaatcagcctctccaaacgagaaattcaacagtgagcgttaaaaaaacagtggaggatgaaaatgaaaaaagaaaaacactcaaaatggaattaagttttgggggcattggatggaagttttaaaaatgaacagtcacagccccccaaaaggtgcatcttctccagtgcggcggaagcagggaagggtttgctttctgggattccggaagaactttcaaagtttcttcttccttttttccccctcctttccttcctccctcctttattctcttccttccacagatgtttcctgagcacctactgtgtgcagggcaccacgctgggcactgcagacctaacaatgaacaaggcagatgttgttcctgctcttgcaaagtttataaccctcccctactgttaggcctgagggtcgtttccagtttttcatggttgcagataatggggcaatgaacatttttgcatgcataccaggatgaggcatggaatgaagttttctgttgccccagaaatggtgcctgaggccaagctacagacaaaggcatcaagtaccccacgttatttttttattttatttttgagacagagtctcgctctgtcattcaggctggagtgcagtggcaccatctcggctcactgcaacctccgtctcccagattcaagtgattctcctgcctcagcctcccgagtagctgggattacaggtgtgtgccaccatgcctggctaatttttttttttttttttttttttttttagtagccgcagggtttcaccatgttggccaggctggtctcgaactcctgacctcaagtgatttacctgcctcctaaagtgctgggattataggggtgagccaccgcacttggccaagtcccccacattctaaagagcacagttaaaactgaggccagacacacccttctgggcttatacagtccagccagtttggttatccccagcgtcccctggctcccctggctcctcacctcattctgctccataagcaggaaactgacaagagatggagagaggggaattattggatcataagttgtcatcccttggagggggtcagttattgtcccctcccttggagggggtcagttattgtcccctccctgtgggagaggagaggggatctctaaagggaccccttgcagagatggggaggcgtccactagatgggcagacaggcatctcgggccacattagaaggtctgtgtctgcttagacagtggcccagcctctgccctgggacctccgtgagattggactaggtattggtgggcagagaggggatgcatggaggaggctgtggccaagtcgaccccagagaacaaggctggctgggactgtttgccagggcaaggacttaaggggaagcaggaggctgggtgtggtgcctcacgcctgtaatcccagcactttgggaggctgaggtgggccaatcacctgaggtcaggcattcgaggccagactggccaacagggtaaaatcccgtctctactgaaaatacaaaaactagcttggcatggtggcaagagcctgtaatcccagctacttgggaggctgaggcaagagaatcacttgaacccgggaggcagaggttgcagtgagctgagatggcgccactacactccagcctgggtgacaaagcgagactctgtctcaaaaaaaaaaaaaaaaaaaagacgggggtgcagcaggaggtctggggtggctgcgtggggtgcgagttgaggggtgggagaagcagggccatggtggtggtctcatgtcagggcccctgaggacacagaggccccagggcacagctggggggcatcctgcacaccctcttccctcacttggccttggctcctggacgctgtctctgtctaccctctcttgctcctctacacctgccaggccaggccaggggctgcctctgggttctcgaggccccagggttcctgctgcctcagcacagccctggcctgtcactgccaggtccacgtccatctctggttgatagcaggggctttgtctcgttcgctgctatatccccggcgcctggcacagggctggtaaacagcaggcgcttgctacgtgtttgtgacgggacctttgttggaggagcactgagctgaggggaaggtcggctcagggtcccccggctgcaggatactgtcctcggcagaggggagggccggctcagggtccccaggttgcagggcgctgtcctcggcagaggggagagcgggctcagggtccccgggctgcagggcgccatcctttgccagctctttatcgtccctcctctttatgccctgcgttggtctggctttcagtttacaaccaaataaataaatcttcatcctcatagagagttttcctctgggcagtgctccaaggaattggaaatgctcccagcctaggtttatggcaaaggagcctccgggaggagatttcttgaggctgtttaggtgaccccaggcctttaccaatgctgtgccctctgccaactgtgtgggctgaatacgtcctccgcctatgaggcctgaccgaaaccccacctcccccaggaagctgttcttgatcccccagctgtgtcgggggttcttctatccagtcctgtaagcacccttcaccccggcatcatcaaaacaggattttagttgtctgtgtctgtctttttcattagactgggcactccctgagggcagggactcagcgctgtgtccccagcagacatcaggtgctcatcacgtgttttcgaaggcagttgattgcttgaaccaggctagaaggtgatgtacagagtgtctagaaatgagttaagtgtgaggttgagatgaggtagggcacacgaggtggagaaataaagagagggaagggcaggccagggagagggcgtggtgtgagcagaggtaccgcagcaggacatagcctggcgtgcggggctctcaaacagtgaggctgccggctgagcccaagctccaggcatggggcggtaagccaagagatggtaactagggttggcgcgacagatgtggagagtaggtgacagactcaactgaggtcctagaggtggaatccatgggggtggttattggagtaggggggtggcggggatggcgcccagtaccctggctcacgactgggtggctggtggagacacagaggaggagttgggggtgggggtggggagcactatgctcaatgttggaccctccgagtgggacgtggggcattgggggagatgcccaggaggccctgtggtctggagaaaggtccaggctggagaaggagcaaggacacagctggcaagggggcgcctgaggccgtggagtggacagaagccgaggaggagggggacttcaccctgagcttacagctccttgcataacttaattgccaatatgattaaacatgtaaataattatttaaaaataaatatatttagaaacttaaaatttggattcaggaacattttaaagaaaaagcacagatggccgggcggggtggctcacgcctgtaatcccagcactttgggaggccgagtcaggcagatcacgaggtgaggagatcgagaccatcttggctaacacgctgaaactgcatctctactaaaaatacaaaaaattagccgggcgtggtggggggcgcctgtagtcccagctaatcgggaggctgggcaggagaatggcgtgaacctgggaagcggagtttgcagtgagccgagatcatgccactgcactccagcctgggcgacagagcgagactccgtctcaaaaaaaaaaaaaagaaaaaaaaggaaaagcacagacataacagtgaattgcacattgcctttcccaaatatgctcacattatgttctgaaaagttccctctgctccctgcccactccatcccactccccagggagtaactgatttctctttccagcatggtccaaagggcttgtcaggggtttgctgtcaagtgagtgatgtaaaccctcccctccactagccccagtaggcatctgtagtgttcactgctcactggcatgtttcaggataaactcttttgtggaaacaagaaaaggagaaaaggagcttgggcctgtgttgctgggagttcacttgagggcccctggagctagagaaggtgggacaaactgttatctacatcacacagccctcctcagaggggtgtcctattgtcctcattttacagagttggcgactgaggatcagagaggtgactctcctaaggccatggaactgatgagtggccgagcttggattcaaacccaggtctgcccagcttcaaagcccaggctcttgctcctatttttaggagaagatacagaccaagtttattttacataggattcagagattcaggatcctggagttctagtgaccatttgacagatggagagactgaggcataaccagggctagaacccaggcctactgcccctgagtctgaagttttgaccatcagcaatcattcagggtgaagggatcttgcaggaaagatgacaacttgacggggccagggttcagaggtgtgtgcagatgggaggttcagaagcttccctagaggctgcagccaattccccccacctctcccctccatcccccacataacacacttggccccctgtgaacccatggttcctgctcagagcaggcggccaaagcagtgtctttgctgcaagcgagggactgagctgttcaacgaagagtcatgtccttcatcttgtcccctgcattttacaccaccatgtaaaattttccattaattcctcggaataaaatgtagtggctgttaatttttgatgcctgggaagtagccagctgagcgcctttttatgcctgaaactattttctaccattagaagagtgtaataaaaagttttctttctttgattttattttttaattagatgagggggtttaggcaagtctgctgtcagagctgtggctggcagctggaagcccaggacgtggcagaggaaggacacaaacaccttcactctcaaataccttccccacagccaggcctcgcctctgagccaaccaggggggccaaggtctggcccaaatcataaaaaaccccgaatcttcattgcttttccagaaaggctgtttgcgagaagtagcatgcttctgcgagaagtttctgtcctgggctttggcttcatacagacgtgtgaaattcctcctctgtgtctctgagtcgaagtcttggatcctcagcttaatagctgagggactttgagcaagtcccttcccctctctgggtttctcctctgtaaaagctcccagggttgttgactaaggagacattgattaaaggagaaatgggtgtcaagcatctaggccatagtagataccctggaaacaacgatgatgggggaatgtgtttaagaggcgggaaaatgccgggcatggtgacttatgcctataattccagtgctctgggaggctgagacaggaggatcacttgaggctaggagttcatagaccagcctgggcaacatagtgagatcctactctaatttttttttttttttttttgagacagggcctcactctgtcatccaggctggagtgcagtgacatgatctcagctcactgcaatctccacctcccaggctcaagtgatcctcccacctcagcctctcaagtagcagggaccacaggtatgcaccaccacatctggctaattttttctattttttgtagagatggggtttcgccatgttgcccaggctgatcttgaactcctgagctcaggttgatccacccacctagccctcccaaagggctggaattacaggtgtgagccactgtgcctggcctacaaaataaaaaaataattaactgggcatggtagtgcacccctgtagtcctaacaacttgggaggctgaggtgggaggattgcttgagcccaggagtcaaggctgcagtgagttataattgtgccactgcactacagcctgggtgacagagtgagaccctgtctacaaaaaaaaaaggaagtgagaaggcttcaggcttcttcatgttccttgatggggttgtggtggggccgggaggagctgggtctaggctggcaggtgcaggcagagatttaggggaaggctgggcgcagcctcacctgcctgcaggaggagacctgtgggggcaggtcctgcttcgccactggcacttcctcctttcaagagtgtgtgttcctcctctcttctgggggaatcgtccctggccgctccccactaccccctcgcccgctttaggatccagacgatgccatcatctcatttcatacccagactcctgggtccatccttgctgggaatttttaaactggagacagggaagaggaatcccttcctctctggtcatgtagtcagaaagacaggagcccagagctactggtcaccatgccccccacgctcaccccatggagaagcctttctgtgcaaagacaggagggctagggacatgaagagaagcagagtgtgaggctcaaatctcatcagcctggcgaggctataactcaattaaatgcaaatctcggtgttgctgtgcaggtgttctgtagctgtgcttaacatctacaatcaattgactcaaagtaaaggagatcatccctggtaatgtaggtgggcctcatccaatcagttgaaggcctcaagagcaaatcagcttccccagagaagaaattctgcctcaagattgcagaataaaatcctgcgtgagtttccagcccggggcctgcccttccaatttcagacttgcaaacccccacaactgtgtgagccaattccttaagagaaatctagctgtctcctttccgtgtcttctattgattttgtttctctggagaaccctcactaatacacagaggaaagaaggaagagaaggagaggggatcctgacagtgggaggccctgtttcctcttgtcctggaggccaccacctcatttgtgcaccactgggtggacactgccagggccctgcccacttgcccttgggctatgcctttgaggtggggacttctttttttcttttttttgagacagagtctcactctgttgcccaagctggagtgcagtggcgcgatattggctcactgcaagctccgcctcccgggttcaggccattcttctgcctcagcctccctagtagctgggactgcaggcgcccgccaccacgcctggctaattttttgtactttttttaattagagacggggtttcaccgtgttggccaggatggttttgatctcctgacctcgtgatccgcctgcctcggcctcccaaagtgctgggatcaccaccgcgggtgcagtgagccaccgcgcccggccgagttggggactttcaatgcctgcaggctttctctggcggtctcccagggacgggcctgcctgcttctcctgcgctctcaccgaggggccaactggacttgcctcccagaagacgtctgtctgaccgcaagagtggcagttgtgggggcgctggacggaccaaacaccctgtgctccggcttacaaacggcgacgagtccatcaacctcctctgggttagagtcctaattcgcagcccccacccactgctgagctcagggctctggaaactgactgcctgattcagccaacaggatacatggtgctggagcctgtgctgatgagcccattaggggaaatgggggctcccaggcacgatgagctattccaggtcatctcaccaagcctgggcccgaatactcccatggagcccagtgaggagggcagcgggacgctacactgacttcttcccttgcaaaggtgcggggtgaatctgtctggagcagggcgggcagaagacatcttcctaagatgtcttccacggggagcggtgggcctctgggatgcccaaggtctctgccatcactctctggtctctacactttcagagggatcgtggagcactgaattgcatgggatcttaagatttcatctactctgggtgttttcaaaacttttttttttttttaagagttggggtctcgcagcctggcgcggtggctcacgcctgtaatcccagcacttcgggaggccgaggtgggtgaatcacaaggtcaggagatcgagaccatcctggccaacacggtgaaaccccgtctctactaaaaatacaaacattagccgggcatggtggcgggcgccttgtagtcccagctacttgggaggctgaggcaggagaatggcgtgaacccgggaggtggagcttgcagtgagccgagtttgcatcactgcactccagcctgggggacagagcaaaattccgtctaaaaaaaaaaaaaaagagagatggggtcttgcttgttgaccaggctggagcacagtggtttgatcatagctcactgcagcctggaactcctgttctcaaataatcctcctgcctcagcctcccaagtagctgggactacagttgtgtgccaccatagccagctccaaatttatctttaaaacttgttataggccaggcaccatgacttatgcctgtaatcccagagttttgggaggctaaggtgggcggattgtttgagctaaggaatttgagaccagtctgggcaacatggtgaaaccctgtctcttcaaaaaaaaataaataaataacattagcttagtatggtggtgcgtgcctgtagtcccagctactcaggaggctgaggtctgatgatcacttgagcctgggaggtcgaggctgcagtgagccatgattgcaccactgcactccagcctgggtgacagagtgagactgtgtctcaaaaaaacaaaaacaaaaacaaaacttgttacagagccctttctccaaggaatatcttacatcaaagccagatatataagagaaaccatgagggaccgactctatttgaggtggggaactgggagacccagctctttgatggctcccttcactgtggctgtaagacccttggagagatcaagttcagccacctcattttcccagtctgcttccacctgcctaaagtcacccccaaatctgacactacatggcacatgtcagtgggatgctcgaggaataaaagccacgtgggtgttctgctgttgctcaccaaccacactgcagtgctgggagccgtatcctggcaagtgttcaaggtggcgctagggaacagagaaggggttgtgagggtgtcgtgggcacaggccccggagggacagtgagcttaataggagtgtgtgtgtgtgtgtgtgtgtgtgtgtgtgtgtgtgtgtgatggtggtggtggtggtgctggtggtggtgtggggattacaaacaggaaggaaatctcattagatgggctgggtcttggtccaaagaccagataaactaggatgtcacaggtggggacagagtccaagattcaatgtcttcagaactctcctgatcaatagttatgagattccatgattcacaaagacagggaccatgtttcatttatttaacacatatttatttacctctttcaaacaacaagctgggggaaccgatcttactgatttagttagcatctatgggaaagctgtggtgtcaatcagggctcttttggttgaaaatgagagaacattataactcattccccgtccctcaatgaattgggactttgtgggcacctgaaactgaaaagttcaggagtatcttcaggttgaacttgatcaaagactcaaataacatgaccaagatgggattcacttctctatctctttaatcattttccttcttgttgaagcacatcctttaatcttttggtgagggcctgtgggtagtaaactctaaatcatgtatatctggaaatatatatatatatatatatttttttttttttttttgagacagagtcttgctctattgtccaggctggagggcagtggcacaacctccacccactgggttcaagctattttcatgcctcagcctcctgagtagctgggactataggtgtgcaccaccacacccagctaatttttgtatttttagcagagacagggtctcgacttgttggccaggctggtcttgaacttctggcctcaagtgatccacccacctcagcctcccaaagtgctgggattacaggcatgagccaccacgcccaacctggaaatatgttttgatctcactcttcagtgacagtttagctaggtatagaattctaggctgacaagtattttttcactgtgtttggagatattagtctactcctttctggctcctattgttgctaattagaagtctattttttagtctaattgtttctttgaaaggaatctgtctttcccacccttctggcagcttcaaaagttttctctttacccttaaagttgtccaagtgcaattagacatgcctaagcgtagattttatttatttgtttatttttgagacaagatctggctctgtcacccagactggatcgcagtggcataatcatagttcactgcagccttgacctcctgaactcgggtaatcctcctgcctcagcctcccaagtagctgggaccacaggcacatgccaccacacccagctaattttaaaattatttgtagagacagagtctccctatattgtccaggctggtcttgaactcctggactcaagtgatcctcttgccttggcctcccaaagtgctgagattacatgtttgagccactgcactcagcctagatttatttttatcccactctgaactatggcttttctctgtgaagacagtgctttcttcaatttgaaaaattcttatatattatattttactatattttattttattttattttatttttttgagacagagtctcactctgtcacccaggttggaatgcagtggtgtgatctcagctctctgcaacctccgcctcctgtctcagcctcctgagtagcggggattacaggtgcccgccaccatacctggctaatttttgtattttttagtaaagacagggtttcatcatgttggccaggctggtctcgaactcctaacctcaagtgatctgcctgcctcagcctcccaaagttctgggccatgcctggcccctattatagtttcctttattgcttttcccacatcctctttactgtctcttattggaattcctattcctgttgtacatcctattagatatataatggatcatttcatttcatcctccatcttaacttcccctttatgtttcacatttctttatctctctctgtgctgtattctgggcgaacacctctgataggtgttctatagcccccaatacttctgagtgtgattatattggagatagggtctttgaagaggtgactaagttaaaatgaggctatcagggtggcccctaatgcaatctgactggtgtccctataagaggaaatgtggatgcaccaaggggcaggaaggatgagcatgcgcaagggagaccatgtgaggacacagcaaggaggtggccgtctgcaagccaaagagcaagacctccgataaaaccaaacaccagcaccctgatctgggacttctagcctccagaactgaaagttaatagattgctgttgcttaagccactctactgttttattatgacagggccagtaaatgaatatgacagactactgtcaaacccacctattgagtttctctctttctttttgctttgtttgttttttcagtttatcttgggtgacttttttttttctatggcccagggcaagacacccacttctaggctgcagcccaaggttattgggcagtttttccagtcccaagaagaaacagctgacttccagctttttcctgatgtagggagcctagtttcagctggagggctctcacagggccaggagccttgtctttcgtcctcacagaggcattcaaaccccagtgccattcagaagtctggatatggcagccccaggtgacttagtggctccatgaagctgccagggacttggacacctttgatcttcacattttagcacccttggggtgcggctttaaccctcttgttgcacttccaggcatctcatctccaaatgccccatgtcttctgtcttttgtttgcttctttgttttgagacagggtctcactccatcacccaggctggagtgcagtggtgtgattacagctcactgcaacctcaacctcccaggctcaagtgaacctcctacctcggcctcctgagtagctgggactacaggtgtgtgccaccacacctggctaacttaattttttttttttttttgagacagtttcactcttgttgtccaggctggagtgcaatggtgaaatctcagcttgctgcaacctctgcctcttgggttcaagcgattctcctgcctcagcctcccgagtagctgggattacaggtatgtgccaccacgcccggctaattttgtatttttagtaaagacagggtttcaccatgttggtcaggctggtcttgaactcccgacctcaggtgatctactgacctcggcctcccaaagtgctgagattacaggcatgagccaccgcacccggaaatttttttttttttttttgtagagacaggtcacgctatgttgcccaggctggtctcaaactcctgagctcaagcgatcctcctgcgtctgcctacaaaagtgttgaaactacagccacaagccaacgcgcccggccttatgtgttatctcttgccacatagtggcctctgctccaagggaagcgggaagagtgagttttttcagtggtacctttcctccccatcctgaaaacaaatgtgattctcctcctaaagaagtagagcaagtgggtgtagagttgttaacatgcaatgtctgccacataaaacatgatccccattttggtgaggaaatcacagcctggagaggtgtggtgatttacacagcctggattcgattgcactgagcctgccccaccctcaccctgctctgattcagggaccctggcctggccctcatctttggtggttgctgtcgtcaaggcactggccttgcgtgatggatgagcaggcagcctcattaaacacaaacccttgttggtttcccaaagcccacaggagcagcgaggcccgggatctgggagcagggaagctgaacaggaccccatctgtcctgttccctccggcttctgctcaaacaggcatttgtctgccatggcaagagggcagcctcagacacttcatctctgggcaattagggggctgcacgtgagaagagtaatgactggccagaggggatttatcaggggccagtgtggctgggcggggctcaagatttgacatccacctcttttccgaggggaaggagctggttagcatccctgcctggcagtggagcctcgttagctctgccttctactgtcccttccccctccaacgctctgctccccaccccacctccttgtctctgccctagatcagaggccaggcactagctggatggtcacacctgcctcctccatgctgccccctgtgaaccactctccgcactggctgctcacaagtctgatcacgtcacacacctcctccctacctttaaatccttccatggctccctactgcccaaatcataagcagctgttgtgttcgggtggtcctaggtgaccagcttccccacgagcgatttctctcctttggtttgattcgtgtcaaagatgagtcttagacactgcctgatgctcaaacggtttatccttttcttaaaaaaaaaaaagatgggatcttgctgtgttgcccaggctggtcttgaactcctggccttaacccatcttcctcccttggcctcccaaagttctgagttacaagcatgaaccatggtgcccggcctcaagtgatttattttggctgtgctgttacgagacagacatcaatgacacgggccagatacacttaggaggtcagaggaccagctgaccaggagggtctctgtgtagagaccatcctcagagtttgggggatccttctcccttccctagacctgggttcagtctaggttagtcgccaggtgtttctttcaaaaaagaagtttaagctattcttgtaaggggaagctttgtttcaaggtttatgaaagttgcatctgtgctgaggtggtcttgttttctggaaatcccctggccagggttggaaatcctggggccaggctgtatcaactgctaagtgacacctggtgtccggcctgtgagatgcttaagtgggtcctatggctcttgttaatctcacagttgcagtatgtctctttttatactatgacagcaacctcagccctggtgacctcagctcccgcgccgcatcctctgtactcttgctcttcaatttttaagaatgagtttcatgattatgggtttcaaaaattacattcaggactgcgtgtggtggctcatgcctataatcccagcactttgggacgccaaggtgggtggatcacttgaggttaggagaccagtctggtcaacatggtgaaaccctgtctctactaaaaaaaataaaacttagcagggcgtgatggtgcacacctgtaattccagctactcaggaggctgaggcagcaggatcacttgaatctgggaggtggaggttgaagtgagccgacaacatgccactgcactccagcctgggtgacagagtgagactccatctcaaaacaaaaacaaaaacaaaaacaattcaaaaggcacacagtaaaacaaggctaactcctgcatcgtcctcacctgcctagtccccatcacctgccacatgccttagttccttgtgtatccttccagtttctttatgcaaatgtaaataggacaaatatgtcgtcatatttaccacccccacacatgctttatatacaaatggtagcttatcaggaacgtggttctatactttcatttttgcacttaatacatcttggagatctttttgtatctgcagagagaaggctgcttcattctctggtacagcttgaccatcatttccttagccagctcccaggtagtggatgtttgtgtggcaggtgctgctgctgccctgtcccatatctcccacctaccagagctcaccagcagccctttcatttctccaggctttagcccacacaggtctctctgcctgggatatgcttctgcttcttcatctcaaatcaagagtctggcagccccgccagagacactaacctaactagttcaggcagggctagcactttgggcctcagggtctcccttacctcctctgcctcaggaatgatcacagtggattaaatcctctccttatctgcctgcctggctgggagcacctgggcaggggtcagagctgtgggggggcaatggggaagatgagtcagattcatcactatgtcccagcacctcttaccacatcccatggcctctagtgaagcaggagaaggattgtataaaatccaaactccttcccgtggcctacaaagccctgctgaccccgtccctgcctgccatcacccccaacctcaggtccagccagtgtggccttcttgttcctcagagacctcaaactcgatcctgcctcagggcttttgttcttatactttcctctacttggactctcttttccccagatctcctgattagacctcagctcaaatgacacttcctccaagaggccttccctgaccaccttgactaaaatatcctactcacccctgccaactttgggaacccaaggcaggaagatcagttgaggccaggagttcaagaccagcctgggcaacatagtgagatcccatctttgaaaaaaaaaaaaaaacacccccactttcttagcagttatgggatgaattgtgtccttcccaaagtttataggttgaagccctaaccccgagtacctcagaatgtcactgtgtttggagataaggtctttaaagaggtgaataagttaaaatgaggccagtagggctgggtcttaatccaatctgagtggtgtcctttttgtttgtttgtttgtttgttttgttttgttttgtttttgagacagagtcttgctctgtctcccaggctggagtgcagtgatgcgatcttggttcactgcaacctctgcctctggggttcaagcaattttcctgcctcagtctcccgagtagctgggactaacaggcacgtgccaccactcccggctaattttttttttgtatttttggtagagacagggtttcaccatgttggccaggctggtcttgaactcctgagctcgtgatccacccatctcggcctcccaaagtgctgggataacaggcgtgagccactgtgcccggcctggtatcctttttaaaagggggaagcaacacaagggatgagggtgcacagagggaaggccgtgtgaggacatggggaggaaagccgaggagggaggcctccaaggaaaccctgcgggtgccttggtcttggacttgctgcctctggaactgtgggaaaataaatttctgttatttgagccaggggtcctcaatcccctggccatggaccagtactggtccatggcctattaggaacctggcacacagcaggaggtgagtggctggtgagggagagaagcttcgtctgtatatacagccgctccccatcacacgaatggctgcctgagctctgcctcctgccagatcagcggcagcattagatgctcacaggagtgtgaaccctgttgtgaactgttcatgcgggggatctaggttgcatgctccttatgagaatctaatgcctgatgatctgtcactgtctcccgtgactctcagatgggaccatctagtcgcaggaaaacaagctcaggctggacctggtggctcacgcctgtaatcccagcactttgggaggccgaggcaggtggatcacgaggtgaggagtttgaggccagcctgaccaacatggtgaaaccctgtctctactaaaaatacaaaaattagcagggcacggtggtgagcgcttgtaattccagctactcaggagggtgaggcaggagaattgcttgaacccaggaggcggaggttgcagtgagccaagatcgcgccattgcactccagcctgggcgacagagagagacttcgtctcaaaaaaaaaaaaaaaaaaggaacacaagctcagggctcccactgattctacattatggtgagtcatataattatttcgttgtatattacagtgtggtaataatataaataaagtgtacaataaatataatatgaatcatccccaaaccatcccccccactatccatggaaaaactgtcttccacgaaacccgtccctggtgccaaaaaggttgggaccactgatttaagctacccagtctgtggtactttgttatgcagcctaagctgactctacatcttccagcgcatttcttccaatgcactgtctgacatgacttgtttactgtctgcctccccgtacaagggcaagtcatttaattgtcttgctcatggtgtagccccagctcctacaacagagcctggtacatagtaggcactcaataaatactcacaggatgaatgagcaaatgccaattccatgaagcagagagtgtcatatgaagatccccccaacgctcacaagcacatgtgtgaatgcacccacatgtgtgctcagacatgtacgtggatagctgggcgctcacacacatgcatcctgccctgcatctttgcctctgaccatgtccacttcatggcaagggccatgtacacagcctgcaggctcagcggatggcatgactgtgcctgtttcaagctggctgtgcctctgagctgccctcagaaacccacgcctggcgctcctgtcaggagtgtgcttggatgctaggcctcccagaggggtcagaagatggggaagaagaatctgtttgcaaatggaaatcagaataagctctaccaggcacagagaacagggaaggcagtgggcagaatatgagttttcccagccccccactgggggtcagaacaatcagcgagttccttctgtgccagccacatgacaagtacattatgccctgtgaagtggtgggttattcactcccattttaccgatgagaacacaggctggtgtatcccagcattttgggaggccgaggtgggatgatttcttgagcccaggaggtctggtttgcagtgatctgtgattgtaccatagcactccagcctgagtgacagagtaagtccctgtctctctctctctctctctctctctctctctctctctctctctatatatatatatatatatatatatatatatatatatatatatatatatatatttatgtacacacacacgggattggagagaccaattcaatactccctcagtatttttttttgagatggagtctcactctgttgcccaggctggaatgaagtggcttgatcttggctcactacaacctctgcctcccaggttcaagtgattctcctgcctcagcctcctgagcagctgggattacaggtcccccgccaccacgcctggctaatttttgcattttcattagagacggagtttcaccatgttggcaagtctggtctcaaactcctgacctcaagtgatctgcctgccttagcctcccaaagtgtcccccagtattttatggaggccctaggtataacactgattgctcacttattttgttgaagcagatgatatggtgattaagagcctcagcttgggagccagacagcctgggttcaaattcttgccctgataattactagctgtgtgattttgggcaaatcacatcgcctgtctatgccttcctttctttatctgtaaaatagagttataatggtacctacttgcttgagttaatacatgtacagggcttcgaatggggcctggcatgtagtaggcacatttcttgagcaataaatgttagtccttattccttatttctaattgtatcaggatgttcccaccgaatcctgctcctcctccagggctgtgccagctgcctctctttcaggccagaccttgaacaatctttgctgtaagaaggtatcacaaactggaaggcttacagctacaggagtgtattctgttagtgctggaggccaaaagtctgaaatcaaggtgagggccgggcctgctccctctgaaatctttcttgcctcttcctagggggatccttccttgcctctgcctagctcctggtggtttcccagcaatcctcagcgttccttggtgtgcgggtgcgtaactccagtctctgccttcctcatcacagggcattctccctgacttcacatagctgtctccttagaagaacgcagttctatcagattaggggcccattctactcaaggatagcctcatctttaattactaattaaacttgcaaggacaccattctcaaatcagatcacattctgaggtccatatctttttttttttgaggggattggagagaacaattcgacccataatagcaaatctctcttgtccctggggaagctgtgtctttaaaaagagctagatggggaataaagagatttcaaagccaacaagaaaaatggtcttgaagtggatgctctggttctccgtgtctctggtttactggctggactgagctccctgggtagttttattctccgatcgctgccgtcacccatattctgtcttccctgtcccttcatgggttgtacggactgccgatcacactggagcatgagggagtcccggccagtctggcccagttgaaagccccacctctcctctgggttaacatggaggagggagggcacagggaaaaggtctctcccctaatagcttcctgttggggactccctcacctcttgtggccaatgccatctctcaggccatccctgactggccatcagggatttctgtgtcattagggccggatggtggctctggcatggggtgcaggtccttgggggatccttggaggcctcttttccttgcattcccacagctgactctgtgtgccctctttttctcccgtagctccccttccctgcctgttttcctctgggcccccttgcctggtcagcagccctctttgctggcagagcagcaagatgtctccctcccatgatgccctcttggctcctggaaacctcccactcccttgctacccagttgctggggctggggtgtgggctattccacgtgtcctctctgcctgcccatattttttcatagttcattcatagttcttctccccaaaaagagaggcatgagagcaggggagcctaggcagaccctccactggagaatgaggtgttggaccctcctaaatgcagctctgctttctgagatttcacttggaaccccctacatttggcttgaattgaggaagtgagagtcattctcccttcccaggggagggaaaagtcttagtgccacctgccttctcctcaggctgggacacttaactccaaagacctcccccaactccccacctgcttatttaaagggggcccaggggaggtagaagagctggtctggctgccccttaataagtcctgaggtgccccccaccaccatcttggtggttatcttggaaaggagttcaatgtccttttgtcctctgccctgggtcacattgcacttaacaacccttggcatctgcacttcagcgcatcctccataacctgaagactccagaaaggaggaagggctaaaagtatgggataagctacccccaaattattggtgcctcctctgtaccaactttgtaacaggtgtttgtctccatggacccactggatgctctgtgagctccatgaaggtcccattttcccaggaccaggcctggatcctggtacattatatatactcaagaaaacatctgttgagagagtgactgtggtggctttagtggttgtcctaaggtttacagtatacatatttaatttgtcagagtctatcttcaaataatatcataccactttatatgtagtataagaaccttacaacaatatactctccattcctctctctcttccactatgctactcttaccatgcattttgtttttacatttgccacaaacacacagtactttgctactgttttgctttagatggtcaaatatattttagaataactaaaaatatgaaaaaagcaaaatttatatttatcttcttttatgccatttctagcatttcttatttctttgcatagatacaagtttctttctggcatcatattccttctgcctggagaacatcctttaacacatcttatagtgcaggtctactggtaattaatgccctgattttgtttgactgaagaaatctcacacttcttcctcacttttgagagatatttccactgggtatagaattttaggttgacagttgtttgctttcagcactgtaaagcagtcaccccactctcttttgctctgcatagtttctgatgggaagttggctataattcttatcttttcccttctgaatgtaatatgccttttttctttggctgccttcaagattttctctttatctttggttttcggtagtttgaatatgattgtgtctagggttgtagggtttgtttgtttgtctgtttgttttctttttcttttttggtcttgcttagtgttttctgaactttctggatctgtggtttggtgtccatcattaattttgaaaaaattcccagccattatctcttcaaatatttcttctgccctattctctttctgttttacttctcagattctaattatgttatgtatgttagctcatttgatatttgacattctttcatagctctgagatgctctcatctgtttttggtctcccccacctcccactgtttggatagtttttaactgatccatgttcaagtccactgattctgattctttccttggctgtgttaagtctactgatgtgctcatttaagatttttattttttaagagataaggtatttctctgtcacctaaggctggagtgcagtggtgcaatcatagcttactgaagcttctaactcctgggctcaagtgatcctcctacctcagtctccagactgaggcgcataccaccgtgtctagtaaagtttttatttttttatttttacagagacagggtcttgttgtgttgcctatgctggccttgaactcttgggctcaagtgatcctcctgcctcagcctcccaagtagctaggattgcaggtgtctcccaaagtgctgggattacagctgccaagcccagaccatctaagacattctttattgctgatactgtgctttctatttttggcatttacatttgatattttcttctagtttccacctttttgctgaaatttcccatttgttcatgcatgttgtctactttttccattagagcctttaagatagtaatcatagttatttaaaagtccatatatgatagtcccaacatctgggccatatctgagtctggttgttgatttcttttttctttctctcccttccttccttccttccttcttcccttcctttcctcccttcctccctccctccctcccttctttctctctctctctttctttccttccttccttccttctttccttccttccttctttctttctttccttccttccttccttctatctttcttttttctttctttctttccttctttctttctttctttttttctttctttccttccttccttccttccttccttccttccttccttccttccttcctttcttctttctttctttctttctttctttctttctttctttctttctttctttctttctttctttctttctgacagtttcactcttattttccaggctggagtgcaatggcatggtcttggctcactgcaccctctgcttcccaagttgaagcggttctcctggcgtggagaccaggtgccaaacaactggtaaaaattcagctaaagttttaataagttgctaaggctgagtatggctgggatagaaatatggatccactgggagcagcagacacacggggaatttgcacctgttcacaggctcatcttcatggatggcgttgggtgctatgagaaagactggggatagagtgagagatgagagaaagcctgccttgtggtgcaagcctaggggaggggagcagcagccactgctggagaagagccataagacactgggaaaggttggcaaatcctgtcaccctcagtgcccattgcagctgggagaagggaaaagaaaaattcctatcctgatgggcaaggggcgagggtgagaaggccccacccccaagacccagggacacagtgcctgcctaagactgaagcagtaccaggacagcagagaacaaacaacctccacgcagtatacacgcacaccttccagccccaggctagcaagtatcaagtaacaagtagtagtctgctgctggagaaggatcaagagcacatggagaagccaggcatggcggcacgtgcctgcagtcccagctactcagaaggtcgaggcatgaagatcacttgagcccaggagttcaagaccagcctaggcgacatagagatgcaggatctctgacgtgcaggatcgtagacaaagtctggagctgagggtggaataagatcattgaagaaaaaaacgctcctggttccaccttaaacacaaaggaatgctagaagaatttgaagcccacggtgcactgatggtaagccagtaacaacaaaggccaaacccagctccattcttgtcccctacacttaaggcctagcaaaagaaaaggcatgcccatttccagtcataaataccatttacctcatctctaccatcccatgcaagatgtctgtctgtaaacagaaaattagaagacatacaaagaaacaagataaaataacatattgtcaagagacaaagaaatcaacaaccaaggccaggtgtggtggctcatgcctgtaatcctagcaatttgggaggcagaggtgggtgatttgccttagcccaggagttcaagacgagcctgggaaacatggcaaagccccgcctctacaaaaaaaaaaaaatacaaaaattagccaggcatggtggtgtgcacctgtggtcctagctactcaggaggctgagatgggagatcacctgagcccagggaggtcaaagctgtagtgagctgtggttgcgccactgcgctccagcctgggcgacagagcaagaccctgtctcagaaaaataaataaataaataaaaaataaaagatataaaacggtagattatctggccttttctcgttgtgagggtggatgtgatactctttccagctttctccatcctaagtggaggctggaggggaaagtggaacagttgtggaacatgcacacacattctttgaatgcagtggaagtgactctgcacagcttctgaggctgtgtcatagagggtgaggcagcttccactttgctcactggagttctgagctactatgtcagaggttcaattactccgagatagccaggctgtgaggaagctgattctcagctgtcgtattgacatgccttaccttggagttcaaatcagcccctaatcaaattggattctgtatttctagccattaagaaatccagggagatcaataataataacagagacattcagagaagcacagtgcctctctggaaaaatgaagggagtttcgtcccactcagccatggcccagacaaagacagttgtaagcaaatggaggtgatgatggttttgtttaactgtcctggcacatcaaatagccagtccaattcccccacacaagtcttagcaacaggggaatgcagaatatcctaagattgctcagtggggcccaactgtcatcagtggggcagcagccatctagtgcatgatgtgatcattaactagcctgtgacagagaacatctgatgggtacaagctttgtttgagggctgggaggaaaacctcagggacttgaggaaatcctggaatcctggtcacagatcacttggtcatctatctgcaaggtcctttgtaaagtttctgttcttttggtggattcaaaggagattggagtgagctagaagatcccttcctctgatattgcttttgggtccaaggtgtagatgggtggtttcatctcaggtgatgaatggcagtctggagtgctgtgttgagaaggattctgaggttctgtccaggttcagcaggaaagagctctgtggtcaatttgtgatgtatcccacggaggcagggagtggaagaggcatatttgctccatatttgtaagctgtcttaggtcggttccagggaagcggactctgaggtggggatttgcatgcaggaagtttattggggcatgcattcaggaacatttgcgagagtgagaaagccaggttgggcaacagaggcctcctcagtcaatcctatgggtgtctctggagttgtcttccattgaggccaggtgtgaaccagccattgatgcagccaacactcctgaaagttgggggaatgaggtccttttttgtccaggcaatcatgtgcccagctgcaagggatgaatgatgggtgatccaaattattatgactactccattcctccttgctagtgaccagtctaggggtaggcgtgtgacctcatccagtcaatgacattgaagggcaagtgtgctaggggctccaataaagactctctttcttgataaaggagacgttagaaggaacactttctcctctcctttcttcattgggatgtgaagcttggagtttcagcagctattttgagagcaggaaggagatatttcccacacaccgtggatgtcagagtgaagggcctgagtctgggtgacctcactgaaccattgcaccaatccagatacctctcaccaccagcttccttggcatgtgaaattaacaagcgtcataatttaagcactttagtcaggcattctgctattgcagtggaatgcttcctgaaacagttcccctcaaaggaacaccattcaatgagtacatggctgcctgtatccaaactgagttctgtgagccaagaaatatgggaatggcttgaggataggacatcaggtctcctggaaacatttcttatttttgttttcctagcatagtttgcatcagagaaatgcaccttccatactccacataatcctggagggctgtcaatcacagacccacatccccaggccaacagggcaggcactattacccaaaataaatcaatcagacttcatctcctgggaattcaaaccttaaatgaagacacagggtggggactcctgtgctgtctctcccaagagcctcttgttgggtccttttgcatcctctttttcattttttttcttctcttttttttttttttagatggagtctcactctgtcactaggctggagcgcagtggtgcgatctcagctcactgcaacctccgcctcccgggttcaagcaattcttctgcctcagcctcctgagtagctgggactacaggcacgcgccaccatgcctggctaattttttgtatttttagtagagacggggtttcaccatgttggccaggatggtctcaatctcctgaccttgtgatctgcccaccttgtcctcccaaagtgctggttgcaccctcttttctctctacaagtctaactccacactgcaggcagagttatcatttaaatgcaaatctgatcttgtcactctcttaaaactcctcagtggctccccagtgcttttgggatcaaggccaccattcttctggtggactatggacaagctgatggatattctgtgggatacatcacagccagctggaggcatgggtttataggtgagggatggcaaggatatgggggtgttcaaaggaggagaagggaccctggaagaaattgtgatgtcattcaggactacaggataggcatgaatggaagggctatgtgttgggtaattactttgtgcaggcacctgccaagtacaagcacacctgagaagcatgactctccccattgtgtagcagaagaaccaacactcggatgggttagataacttgcccaaggtcatagagcttgtcagaggtaaaacccgaaattgaaccagatcactgtcctcgatttcaaagtccactcctttagctacaagtccatccaccgcttttgtgacagacattgtaatgtgctccccaggacccctttaggaattgctatggtttgaatgttcacgtccgctccaaaattcatgttgaaacttaatctccaatgcaacagtactaagaggagaagcctttgagaggtggttaggccatgagggctctgcctgcgtggatgggattagtgctttataaaaaggcttgagggtgtgtgttcacccattcattccttctgccatgtgaggacaaggtgtttgtcccctctggaggatgcaacattcaaggcaccgtctcggaagtagagagcagccctcaccagacactgaatctgctggcaccttgatcttggacttctcagcctccagaactataagaagtatatttttgtttttttataaattactgaggttgaggttttttgttccagcagcacaaatggactgagacagaaatgaaggatttattcccatggcttctgggaacgctgccagaagacagccctcagctattagccttctttggagattgtctcaagagaagaaaacggtctcataccaaggtcatgcctccttccagaggcagccttcatccaacaactgaccaaagctgtggtacagagacctggtccagttgccctagttcaggtcaactccaaagggccatcccaactggagagcccctcccagagtcagctgaaccttcaatgagactctgcagccgcaccgctccctctgcccaatcctgcctctgtcccctcccatcctcaggtgtgagcctaacagcacgccccataaacatcctgcaaactcatctccatctaagtctgcttccccgggaacccagcttgtgacagaccccagatttcttaccaagaatttgtttctgctgtttcctctaactgaaatgtggttcccccagcctctctctctctctctttttttttttttgagacggagtctcgctccgttgcccaggctggagtgcagtggtgtgatcttggttcactgcgacctccgcctcccaggttcaagcaattctcctgcctcagcctcccaagtagctgggacgacagctactgggactacagtgccaccatgcccagctaagtttttatatttttagtagagacagggtttcaccatattagccaggaaggtctcgatctcctgacctcatgatctgcccgcctcagcctcccaaagtgttgagattacaggcatgagtcactgcgcccggtgtagcctctctttatcaagatgttcctgctcattctctgagtgagagtggcgtgaacacagctctgccacagtcaggctggtttctagccatatacctcatgactgttcctactgtagtgccttagcttgtggtatacccccagtcctcctggaatgtccttcaccatcctaaccctaccaccttagctggactcagaggaacaaatatataggactgacaattacagtcgctcaggatgctcactgcacaactcccagggggcaccattcccagttcagcgatcaacctgtccagcatcactttgcaaattatgctacaggaggttgagagccaggctttgggtcaaaaggacccagatatgaatcctggttctgctgcttattagctatgtagctttagaggaaacattaattcttgtttccttggtgttttcatctgcaaaatgagggtataccataccgtagtgattatttttacttttttttttttttgagatggcgtctcgctctgtcacccagcctggagtgcagtggtgcgatcttggctcactttgcagcctctgccttccaggttccagcaattcttctgcctcagcctcctgggtagctgggattacaggcgcacaccaccacgcctggctaattttggtatttttagtagagatggagtttcaccatgttggccagactggtctcgaactcctgacctcaggtgatccacctgccttggcctcccaaagcgctgggattataggcaagagccaccgcgtccagcccatattgtattgattctaagatgcacagtttttcattttcacatctctgaaattaggctatatcttacaattgctggtatgctatatttctaatcagtagcattttttctttcttggtgttgataaaatcacggtgcatattataagtaatgccatggtagacttgttgaaagatggaaaaatatctatctcagaggaggatggataagaccagcatgggatgcccagggtgtcacccaccctgtatcccctcagtctaccctgagggtcacctgcagcttctttggaagttcttgtacaccatgtaaatggagcaagtcatttccaacccccctttctcagtttccttgtctgtataaagggtacataatagcaccacctcatagaaggttttttttcattttttttctgagacagagtcttgctctgtcaccaggctgcagtgcaatggcgtgatctcagctcactgcaagctccgcctcctgggttcaatcgattctcttgcctcagcctcccgagtagctgggattataggcgcccgccaccacacccagctaatttttgtatttttagtagagacgggtttcaccatgttggccaggatggtctcaatctcttgacctcataatccgcccaccttggcctcccaaagtgctgggattacaggcgtgagccaccgcacccgacctttttttctttttaaagagggtcttgctctgtcactcaggctggagtgcagtggcacaatcatagctcactgtagccttgaactcctgggctcaagcaatcctctcacctcagcctcctgagtagctggtactacagctcatcaaaaaaaaaatttttttttagagacaacatgtgtctaaatgcttaggatggtctcgagctcctgggctcaagcaaacctcccaccttggccgcccaaagtgctgggattacaggcgtaagccactgtgcccaactctcatacagtttcatgaggacaaaatgaactcgggatggcgaagtgggtgtgccctgtgtcagcctgcatgctgccaggtgcagctctcacagcctaggctgaggccattggcaatggcaatgcagtctctgtctgtctgcctggcttttgttcatctctggctgttgggagattcgaggtgaggtaggaggtagctcctcatcccaggtaggcaggaggacctgggtggcagtcctcgctctgccagcttgggtgagtctcactacctctctgaggcccagcttcttatctgtattagtgatctcttgggcttattgtaggactaaaagtttgtgaaggtaaagtgcttggcgcatggtagatgctcagttttaaaacagaacttctgcctggccaaaagaaaagactggctgggggctgacatggaggcatattgcccagtggcccactcctgaagatggtgaaggtagtataagtgtaagagcccacactcagagcctgtccctacctgctgagactccaggattaaaaacctgaagtacagccgggtatgctggcccacgcctataatcatagcactctgggaggctgaggcgggtggatcacctgaggtcaggagttcgagaccagcctggccaacatggtgaaaccccatctctactaaaaatacaaaaattagccgggcgaggtggtgggcacctgtaaccccagctacttggggggctgaggcaggagaatcgcttgaacctgggaggcggaggttgcatcgagccaagatcgtgcctttgcactctagcctgggcgacagagtgaaactccgtctcagaaaggctaacaaacaaacaaacaaacacctgaagtaccacaggcatctcagatcattcctgcctccaggctggaaggactctgtgatgttgtgatattataagaaatacacgcgtgtaatcctggcactttgggaggccgaggcaagcggtttgcttgagctcaagagttcgagaccagcctgggcaacatggcaaaatcctgtttctacgaaaaaaatacaaaaattagccgggcatggtggcacacacctgtagtcccagctgcttgggaggctgaggcaagaggattgcttgagcccaggaggtagaggctgcagtgagctgagatcacgccactgcactccagcctgggcgacagtgaatatatacttatttggtctctgcctatggttcctgagatagagatcctaagaccttgtaatttcctgagcaataggggagtgaggagaatcttttgttctgatattcggtctttgaccccagttcctgacacaaagctccaaaaacctttttaattgcctgagtaatgggagcacgtagcacagctcctaaatccctcaggattccccgggtgacaggagcttcttttgttcttacgaggtgactcttggggggctcctggacagcctcagaatgggggttggttgccaagggaaccaaccatgtgattagagagttggaactttcagccccaccccctaactccaggaaggggagaggggctgaaggttgagtgggttaccagtggccagtgatgtaatcagtcacgcctatgaaatgaagcctccatcaaaacccaaaaggattgggtacagggagcttctaggttactgaacacgtgaaggtgcctggagggtggtgctcccagaaggcggggaagctctgtgctctctcactcccacgtcccttgccctgttgacttcttcacctggctgttcatctgtcctgtgtaatatgctttgtaacaaacctgtaaacataagtgcttccctgagttctgtgagctgtcctagcaagttaacctaactcgagggagtcgtgggattcttagtttgcaggctgtcattcagtggtgacgacctattacttgcaactagcctctgaagtgggggcagagttgtggaactctgtgtgatctgatgctatcttcacgtagagagcatcagaatgcatctgaactaattgaattagaggacaccctcttggtgtctgctagagaactgcttggtgtgtgggaaaacctctcactcacacatctgctgtcagaagtgttgtgttgtgtggtgtgtgaaagtagaaaaacattttttccacttacctctctctctctctttttttttggagacagggtctggctctgtcgcctaggctggagtacagtggcttgatctcggctcactgcagcctctatctcccaggttccagccatcctcccacctcagcctcctgagtagctgggactacaggcacatgccaccatgcctggctaattctttttttttggtaaagacagggtttttttatgaactcctgaggtcaagcaattacccacctcagcctcccaaagtgttgggattacaagcatgagccactgcactgggcctccacttatcaattttttttgtttgtttgttttttgagacagagtcttgctctgttgccgaggctggagtgcaatggtgtgatctcagctcactgcaacctccacctcccagattcaagcgattatcctgtctcagtctcctgagtagctgggattacaggcaagcgccaccacacccggctaatttttgtatttttagtagagatgaggtttcaccatgttggccaggctggtctcgaactcctgaccttgtgatctgcccaccacggcctcctaaagtgctgggattacagacatgagccaccgtgcccagcccacttatctcttatagaccccaaacctccaaccaagtttcatctctgaccaaaaacctctctgccaccttgtgtacggaccaagattccaccattgtcacgctttcctggcatctcaggctggcacattccacatctattctaatcttccttcagacactgtttttctcctatgataccattaactaggagttgtccactctctacttgaatgctcctagccatgaggatctccctccctcctgagacagcctccttcagcagagtccagctgtctcctgtgcagttcttccttacatgcagctcctgcctgaccctcccaggcccccatgctcagtcctaggtctgtccctggggccacccagaagtggtctgctccgcctacatccccatccccacaaggatgaaatgttccttataggacaaggtgtatctaccatttctttttttttttttctttccttccttccttccttccctctcactttctttctttcttttttttttttttttttctgagacagagtctctctgtcacccaggctggagtgcactggtgcaatctcagctcactgcaagctccacctcccaggttcaagcaattctcctgcctcagcctctggagtagctggggctacaggcacatgccactacacctggctaatttttgtatttttagtagagacagggtttcaccatgttggccaggctggtcttaaactcctgacctcgggtattccacccgccttggcctcccaaagtgctgggattgcaggtgtgagccaccatgcctgacccatcatttctttaagaaaataaaacacctctctctttaaatatatgcctttctttttttaagtggaaaagtaatccatgtgcattgttgaaaacatgggaaatgtatgtcaaagtagaaagattaaaattacccataattccaactcccagaaacaaccactattaacttttacttctgccttcctattcattttccccataattgagcgcatagtgcatagaaaatttggtgctctgctttttccacataacattattacaggaatatttcgctgtaccattcaaatttctttcaaacatgatttttatttttaatgattatgtagtacaccattgtctagacaatttactgatcgttcccaattgttagacatttgggtcatatttaatttttaactatgatgtcacaatgctgtggttaaaaaaaagttgtatataaagtattttaccgctttcaaattatttccttagactcatatcctagaagtattaccattaggtccaagggttgtaggtattttaaagacgacattctcccaacttttttgtctttaacagctttaatgggatgataaatacagcttgagaaacatattgtgtgacaagatgtcacaccaatagccagactgtaaaactgtacacaacatccttttataaagttttatcatttgttttcaattttataaagatgtcttactgtactggtcatttatatcttatcattcacacaccagcagtacagatcccagggacagcgcctaggactgaggtgctccaaggaggacagaggcaaaggcatggcattctgctgagaaaagacttgtaagagcaattcattattttattttattattaaatttgtttttaaattattattaaaatatttttcatgatggggtctcacactgttgcccaggctagagtgcagtggctccagtacagcttactacagcctccacttcgagggctcaagcaatcctcctacttcagccttctgaacagctaggacaataggcgtgtgcccctatgcctggctaatttgttttagtttttgtagagatagagtttcactgtgtcaaccaggctgttctcaaactcctggcctcccaaagtgctggggttacagacgtgagctactacgcccagcccaattcattaccttaaaaccaatttttactcatgctaaaatcatatgagtgggccgggtgcggtggctcacacctgtaatcccagcactttgggaggccaaggctggtggatcacgaggtcaagagatcgagactatcctggctaacatggtgaaaccccgtctctactaaataatacgagaaattagctgcgtgcggtggcgggtgcctgtagtcccagctactcgggaggctgaggcgggagaatggtgtgaacctgagaggcggagcttgcagtgagccaggatcgtgccactgtactttagcctgggcaacagagcgagactccgtctcaaaaaaaaaaaaaaaaaaactcgtatgagtgtccattatatgtactttttccaacattaaatactgtttttcaatatttgcaaatttgataggtaaaaatgaacacatttttcattttcttcaaattttttaaaattttattaatatggaatactttaatatttattggtcggccgggcgcggtggctcacgcctgtaatcccagcactttgggaggccgaggcgggtggatcatgaggtcaggagatcgagaccatcctggctaacaaggtgaaaccccgtctctactaaaaatacaaaaaattagccaggcgcggtggcgggcgcctgtagtcccagctactggggaggctgaggcaggagaatggcgtgaacccgggaagcggagcttgcagtgagccgagattgcgccactgcagtccgcagtccggcctgggcgacagagcgagactccgtctcaaaaaaaaaaaaaaaaaaatttattggtcattcgtatttcttctcgtgcaaactgtcaatgtcgcttgtctctttatctgctaggggtcttactaggtgttttacttgttgatttataagaactctctatatattaaggatgttttggaagccaactattatctcaacttgttgtttgcctatatgtttcatttgtgagtgtctgtagagatcatttaaatttcatgagccgagtgtatcagtcttttattttgtgattcttttttctcctttgcttttttttttttttttttttttagacaggctctcactcccatcgtggaggctggagtacagtggtgcattcacggatcactgcagcctcaacttcctgagctcaggtgattctcccacctcagcctcctgagtagctaggactacaggtacatagcaccacgcctggctgattttttgtatttttggtagagacgggttttgccatgttgcccaggctggtcttgaactcctagactcaagtgatctgcctgccttggcctcccaaaatgctgggattacaggtgtgagccactgcaccctgccttctccattgctttgtaatttaggaagtcttccccaacttgatgaatatctgtttctattttcttctaggttttaaatgtttgcttacatttaactggattccatctggagtttatttttgtatacattttgagggaaggatctctgtggatcttcttttttctttacccaaatagtaaatcaattatgcacgaaatagttttgggtgcccccaccagcctcatcacccatggaaaaagctttcattctttcatgtccttcctaaagtgtggggaccagaacaggaacaaataattcttaaacaattaaatgaaagcctaagctagattcttttcagccttcttataacaaccctgagaaggagattgattatcagtcccatttatggatgagaaagctgaggctcagagacgtaaagcaactttcccgaggttaacacagctagtctgatctggaattagaacatacattgtttgactgctatatccccaggcctcagcatttataattggtttcaagttgaattagctctgggttctctttacagaggaaccacctgactttgctactgggagatgagcatccagagcccagaccttcagagaatgggcttgggaacctgagcccagaggaaacacatgccaaaccagttggtgaatttgtttttattaatttttttttttgagacagagtctggctctgtcacctaggctggagtgcagtggtgtgatctcagcttgctgcaacctcacctcccgggttcaagcaattctcctgcctcagcctcccaagtagctgggattacaggtgcccaccaccatgcccggctaacttttgtatttttagtagtgatggggtttcaccatgttgaccaggctggtgttgaactcccgacctctggtgttctgcccgccttggcctcccaaagtgctgggattacaggtgtgagccaccatgcccagccaaatttgtttttcttaagttagcaaaatcctacattttcactgaaaatattttgggtgtctcaacaatcttcacacctctggtttcctttaggatgaatttggttaggctggtttgttttgttttcttgttgcaagggacaggttcccactcagtggttaaaatgaaggggcttactaaggtcacagaaaccaggatggatccagatgtggtgactcatgcctataatctcagcaccttggaaggctgaggcaggaggattacttgcggccactagttcaagaccagcctgggcaacatagcaagaccctgtctctataaaaaaattgttttaaaaaaaattagctgggtgtggtggtgtgtgattgtactctcagctacttgagaggctgaggcaagaagatcacctgagcccaagagttcgaggctgcagtgaactatgatcacaccactgcactccagcctgggtgacagagcaagatcctgtctcagaaaaaaaagaaaaagaagaaaaagaaaaagaaaagaaaagaaaggaagaaaccaagagagaaaaacacagttcataggggctttaggacaaatgccagccctgcccttcagtgcccctggaagtcactgtcctgcctctctctgcagactacaagctaggctgcttcacagggtcccacagggtgtcagcccctgagtttgcatacaaacctacaaaacacagatttgggagtagtgtgcttaccggatttgggggaactgccaatctctatgattttgcaactcgaataatcctcaccttaaaaaaatttttttgagagtatccaattttttgttgttgttgtttttgtttgtttgttttttgagatggagtcttactctgtcaccaaggctggagtacagtggcacaatctcagctcactgcaacctctgcctcccaggttcaagtgattctcttgcctcagcctcctgagtagctgggattacaggtgcgtgccaccatacctggctaatttttgtatttttagtggagacagggtttcaactagttggccaggctggtcttgaactcctgacctcaagtgatccgcccaccttggcctcccaaagttctgggattacaggtatgagccaccatgcctggctctaattggttgttgatcaaccaatgaattcactgtgtctagtcaggtgaccatctctagctccatcaactgtaatggtagctgtgggaggtcgcgtggttcccaggacgcccctctccagagcttgaggtgaggcagagaaactgacatccccgtctcaccagaggtacccaattctgtattccacgggtggttgaatttccttcatcccatatttaatgttccaaggcagagctgctattgttttattttgccaaaaaaaggtaatatatagcaaacaaacaacatgatccccatttagtatcaccaccatttcagaaaccataggtaacttgcacctcaaaactaaaggttagagataatcccaaagtaaaggacagccttccttgcgacggataattggccacctcaggacattcttgctggggaccatgggcacaggcaccagtccatgaaccagtacgtgggattcaagctttcttctcttgcctgctcccgtgggtacactctttccatgagtgcaacttttagaacataaacagggggctatggtctcaagttaactgccttcatgtctggggtaaagagccacatgctgccacctttaactctgtttcattccctggaacctcatgtggccgagaggtcagcattaagttaggataagctcccgggatccccaagcctgtctccaggaaatactttagaccctctcacctcattcccacttcatccctttggatccaactactgataagacttcgtgcccctgatctcctgtttcctgcaggagctgggggcagggcccacctttcccagccctttgggtttgacccatggaggagctttgggagtaaacgtccggcggatgagccacagttggtggagcgggcactgttggagctctacccagctgccctcggatcctcttagcatttctgtttgcccaggttccaggtgttttcatctgacagcttccatgtgagatttttcttcagaggattgcccttgggctcctggagccactggctgcacagcacaaggacctggaagtgcctgcagtttacttccccgccgggtggcccttggccatagatgggcagatacacaagagcatgagtccagctcctttgcctccaggcacaaaccgagctgtaatttacattcctcggctcccagtgggatcagattgaggctgggacgctatctgctagtgcactcttgcttggctttttctctttcctatcttcttcccccactcctgccagtttctcctaggagcacttcataaatcacttgcccaggaatcgttgtctttggtttgctgctaagccagtccccctgtcctggggatcagcaggctatggcaaaagtaatgcccagaggaaaagcaggctgtgagtgtgcagcacttttgctagctcatgcttgggagggcctggaccagcatccttgcatgccctaaatcaacaatgctccagacttgcaggtggtctgattttcaataggaaagtataacctattttttattttttacatttaaaaattatttttaaacttacttggagatagtaagagtcactttttttttttttttgagacaggatcttgctctgttgtccaggctggagtgcaatggcgtgatcacagctcactgcagccttaagcaatgcttccaccttagcctcctgagtagctggagtaccgatgcacaccaccatgcccgactaatttatttttttgtagcgaagcagtctcattattttgcccagggtggtctcgaactcctgggctctagagatcccaatcctcccacctcagcctcccaaaatgttgggattaaaggcaagagccacttcatgcagcggagagtcactctttttggtgtgtagttctaggagtcttgaaaaatgcatagaatcagaaaccacaatcacaatcaagatatagaagcagattctgtcatgtggccagggccctctgtaaccaaaccttcccttcaccctgatcccctggcaaccactgatctgttcttcatcaccatagttgtgccttttccagaatgccatataaatgaaatcacacagtagctttggcttcttttaggtaacacgatacctttgagattcatccacatttttgcacgtatccattgctggtccttgtggacgttttcagtaatcaaaatggagtcacttatgttgaccccgaacaaaatggagcccatgggccttgaaggaagggctctcgtgcacatatgcctatgactggaatgattgtaaggactctctgaaaaccacaacaatttcaaaaatttcagataagcctcttgcacaagaacacttgactaacaatggctgccttcaccaatgagtggatgccaactattgcaggaggcccctgtaaccaatggtccttgtttcaaagcagcttttgtgaacttttccttttgtctataaaaggaaactcctttggatatgcctgtggttcaccagagcatgcatatcgctcctgctattcccaaataaactctttgttttaagtaacacaatatatttgaagtttatccaagtttttgtatgtatcaattgcttgtcctggagggcaactgttctggagagcaggtctctctcctgtttacttaaggtagacatccttttttttattgctgaatagggttacattgtatagctcgactacagtttaaccattcctcaatggggaaacatttggggtttccagtttttcatgattataattaaagctgatatgaacattttcatatgttttttggttcaacataggcttttgtttcacttgagtaaatgccaaagagatttctgggtagtttgttaagtgtatatttatctttgtaaggaactgccaagtgttttccggagaagttgaactatttggccttcccaccagcaatgtgtgagagttcttattgcttgacatcctcaccagtgctgtacagtcagggtttgtttgcttgtttgtttgggtctttttttggagggactggttcttaatttctttctttcttttttttttttttttttttttttgagacagggtcttgctctatcgcccaggctggagggcaatggtgcaatctcggctcactgtaacctccgcctcccaggtttaagcaattctcctgcctcagcctcctgagtagctgggattacaggtatgtgccaccatgcctggccaatttctttgcattttgtttagtagagatggggtttcaccatgttggccaggctggtctcaaactcctggccccaagtgatccacttgctttggcctcccaaagtgcagagattataggcatgagcgatcatgcgtggcctggttctttatttcaaaaagacactcatcagtcttcagtatcaaaacagttgcactattgatttctttttctcccagttgtcgtcaaagaggcatcaaaggagagtacattgtaagccaataagctgcagtttgtacgcctaacagacctcctagaaactttaccaaaaagtggggattaggtagggaaagaaactttaaaagatcagcaacctgccagcctacagactgtggagagctctcacagccagagggggtagccagggtgccagaaacccaaagaagcaaagtttcaaaataatatgacatttaaaaagttttgtacacaagctattcaagatttctcactgactgatacaaagcacaatgacatggcacttttagagacagcagcttcaaacccagaaaagggtgatgagatgagtttcatgtggctaaatcagtggcaaaaacataatcttctttctttcaaggaggcaggagagcaatcaagtggtcacctcaatgtaaggggcacatgatccactctgtaagcggctgggaatggggtggagatgggacagaaatttggtctcagaggtctcaccgtcttaatttggtcacttcttttttttttttttttttgtcccagatggagtcttgctgtgtcgcccaggctgaagtgcagtggcgcgatcttggctcactgcaacctccgcctcccaggttcaagtgattctcctgcctcagcctcctgaatagctgggactgcagacgcccaccaccatgcctggctaatttttgtatttttagtagagacagggtttcaccatgttggccaggctggtcttgaactcctgacctcaagtgatccgcctgcctcagcctcccaaagtgctgggattacaggcgtgagccactgcgcctggcttaatttggtcacttctaatgaaaaaacaaaaaagtaaaaataactttgtccaaagatatcttaaagctgaaaacctgaacagcacattttttgttgctgttgtttttgggctaactcctggaatcacctttctggtttggctggtactttgtgcaaagctatgatttcccagagtggagtctttccccgggctctgtttggttctcagtaaggcaggctcatacctttttcccttttttctagagaaagcaatatacagtaagctaaacagtcaccttccaaaagggagaaagggattagattgctgcttcagagctgtggaactatttggaatgttttacaaatggttgctataaaacaacaaaaaaggtaattactaaatgtatacaacacaacatgcttttaaagacattatgtgttgcactcacattcgcttaaatgttgttcccaaaggtgctcagcctctagcgcagctggaatctctgggaagaggcagagacagtttggcaaaaaagacacgtgggggaggtaggggtggtgaaaggagaaagcagccttccagttaaagatcaaccctcagttaaagggcagctttgggcaggctggcctagttggagttggggtcagagggaggagcagtggcaaggtgggactggggtgctctgcatctcattcagttaagcaggtctggtctggcatcctttgtgtacagaggtgctcctccttggtgcatttcagtttatcttccaagtcatcaattgtctcttccagcttggctaccgatctctcggcaaactcagcccgggtctctgcctccttgcgtttatcagtaagaatctcagttgcttcctcatatctgtcttctttttgagagtccttttcttcggcagcactcagccacttcaggttctggtccatcgatctgatctgctcctccatctctcagccacaggactctgccagctcaggttgttcctctctgcgtcccaagtttccttcaacaaccaccaacttatgagccgagccccatcttcatgcttcctacctatcttctgcaatgtgcttagcttctttgagttggatttcctggagtttcatctttttttttttttttttgagacagagtctccctctgtcacccactggagtgcagtggtgcaatctcagctcactgcaacctttgccctctgggttcaagtgattctcctgcctcagcctcccgggtagctgggattacaggtgcgcaccaccatacccgactaatttttgtatttttagtagttttaccgtgttggccaggctggtcttgaactcctgacctcaggtgatccacccacttcggcctcccaaagtgctaggattacaggcatgagccatcgcgcccagccttttcttcatcttttaaggctcgattttcaataaccttcctacctctcccactctcaatcagcagcttttaccacttcttccagcttttgcagagcagtggccaggcacgcctgagcactgtccagctccttttcaaccagctggatcctatggttcaaggaggccaccttggcctcagcctgttccgggcccaccttgctccctctactccccgctggaggcgcttagctctctcctctgcatcatctgcctgctgctgctgaacctggctcttgcgctttactgccttgatggtggcgatcccagccacggtgcccacccagcccctgcttgtgctccaggtcctgcctctccactcagcactgcagccgtttctcctactgtcagtttcccccccccccacattccaataggtagcctcagttttaaaaaatcaggtcagttgggtcatgccatttctttgcttccactttccaatggctcatatcatgcttagaataaaacccgaatccttatgtggcccatagggttggccagctcctgacagtccccctggcctcttctactctcccactccagctatcctggtatccgtgctgttgctcagacatgcccagatgccccaccttgaagccagtgaccttgcggcttccttatcttgaatgcttattcctcaggttttcccatgggccacctccagaaaaggtggcatctcaaagctatctctgcggaagggtctttgctccccatcctgtggcctggttttattttcttcacatctttcatcaacatgtgaaattatcttagctatttattatttttaaaatgtattggatctcattaaaatgcgtgctttaattgaagtataatattaagtgtatagctcaatgactttttttttttttgagaaagagagttttgattctgttgcccaggctgagatgcaatagtgcaatctcggctcactgcaacctctgcctcccaggatcaagtgatcatcctgcctcagcctccgaagtagctggaattacaagcatgtgccaccacgcccggctaattttttgtatttagtagagatggggtttcaccatgttgtcagtctggtttcgaactcctgacatcaggtgatccacctgccttggcctcccaaagtgctaggattacaggcgtgagccaccgcacctggcctctatgactttttacacatgtgtgcttgtaaccgttccccatatctggacatagaaggttcccagacaccccagaaagctccctcatgtctcttcttctcaaaggtagccactattctaatttctatttggtttctgtcatagatgagttttgcctgcctttgagcttcatgtaagtggaatcgtgtaatttggacactttttgcctaaattctttcattcatcattgtctgtgagatacagccacatttttgcatgtggataaatgcaacagcagtttgttctttttatattgctgttgcatggagtactgcatagcaataccccattgcacagcagtgttccattgtgtcagtataacacaattcatttattcattcttctgctggccgaccatgggttgcttctgactggttgctgttgaataacaccgctgtgaacatttttacacgtctttccatggagagatgcactcatttattttggatatatgcctgagagtagaattgctagatcatcgagtaggcatatgtttatcagctatttattcttttacttgtttatatttttttctcttcctggactgtaagttccatgaaggtaggaaacaaacttgtcttgttcactattgtattcccagtgtgtagcacagtgcccagcacatagtagctgcttaataaatatttgttaagtaaatgaacaaacttaagctactatcagctccaagtaagttatgacaaagaacccaggactagctacaaatcctcctgacattcgcccttcgcaagctgatatttgagagcccagctgactcagaaggaggcagagctgcaggtgctgggttattcagcatcctgttattctttgaagtggctccccctccctctcttggcctgcattgtcacagcttgaaatattcttttgattatgagaacatttcccattaagtgtgcatctccagcttccccccaccccccagtatttatgagctcataactccagaatctgtcacaatcagtgctgcaaaagtgtatctgaatgtaatgaaataatttgatgagaaacgtggcggggagacagttggaattttctcctgccttacaaaccatccccaggggacaggtgtatataaatcaacacctcccttaattaagtaaaacattttagggaaaaaaacaaattaattaccacttcatggcaccaccccagccgattacccaaatggttcacattccataaacctcacttgaattcagaactaattatcactcttttggttggtttatgcttcccaatctacaaagatctgtattaaaagtgggtagtgtggtatggctttttcactttactttcaggatgatgtaagctgtcaaaagaatcaagaattaagtcttaaaaaaaaaaaagagctgaaaatgcagggaacgtagaatgtggaacattcagggtaggaaataaacatcaccttggggtgttgctgggatggtggggagaagcctatagagtgcaggatgtgtggggtcttgtcctggctgagtccctgacttgctgtgaaatgttgggcatgaactggacgtctctggtctcttatctggggaccattgtccattacctgcctggcccccagggggagcccttgcctcctgccatgtggtcccaacagggagtgagaatcctgacatctctgagcctccattgtccagcctggcctgatgtctttcctaattatccttcctgctggctctggcctcccccttgccctgtgggcccgatcagttctcatctttgatcctgcagggccccgtggccagggtagctgctaatagcttctcctattcccagtccgttcagctgccttctgagtggttcactcccccagtggagcaggctgcgcaggcctggccttggctcttttggactatgtgtgggagtgggagtctcaatggcatcaagcacagttggccttggtagccccctccagctgtaagccttgtaagtccagagtccagtgctggctaagccaaggcctaaccttcccttgtttctgccacttgccccacttgagtgggtgtgtacattgtaagcgctcagtcagttctcagtcactatctgaatgttaacgaaagacatggataaccagaaagaaacaatccaactctttaaaacatttttaaggcatgaattgcacatagtacagtgcataagttatacatgtacaactcagtgaatctttactttgtgtacacctgtgtaattccaacccaggtcaagacacaggtcattccacctccctaaaagtttcccttccagtcaacgctcctcaaaaataaccattatcctgacttctatcaccatagattggttttgtctgttcttgcatttcatataaatggaatcatctggtatctagctttctgtgtctggcttgttttgcccattcactgagtctatgagattcattcttattgcggatagcagtaattattgaactcttttttagactgaagttttaaaaagtgattacttgagcgattactgattgttggtatctagcttgacagtatgttgtccttttaaaaaataaccacataccaagatatttgtgggcctaatactgtcattaccatatgtacaaaaagaataatttagctcctgtgagcactcgagtacattcaaattccaaatggagcagggatgaatttgattaggaaggtgtctgactacagcccttccctcttgagaaccttccagggcgttttcttattgcattaactcccatttgctgagtgctgtggtttgaatatttgtcccctgcaaaactcatgttgaaatttaatcaccaatgtggcaatattgagaggtagggcctttaagaggtgattgggtcatgagggctctgcccttatgaatggattaatctattcatggattcataggttagtggattactggattatcatgggagtaaaactggtggctttataagaagaggaagagagggatgagcgtggtggcttgcatctgtaatcccagcactttgagaggccgaggatagaggattgcttgagcccaggagtttgagaccagcctgggcagcatagtgagacttcatctctaatttttttaaaaaagaagaagaagaagaggaagaaagacttaagctagcacgctcagccccctcaccatgtgtgatgccctacactgccttgggacactgaagagagtctccaccagccagaagcttctcagtagatgcaagcccttaaccttgggctactcagcttccacacttgtaagaagtcaatcccttttctttgcaaattactctgtttcaagtactctgtgataagcaagagaaaacgaactaagacattgggttgctagagaggtttagtatcttttcttagggtcatttattacctgtgtaacaggtaggtcctgctgggaccctttctgaggactccagggagggcatgaggaagttggagcctgctccctccaggtcatgtgtgagagggtgggaataatctgggtacaccctgcaggttgtctccaaaagggtcagtcacccccaaacccagggaacatcagtgctggggcaggtgggggaagaatcagggtccactgtctcttgggctagacccaggcaatgtctgtccccatggaaccctcagccctaatccctgccttcagccctgagagcttgttagcaagaggctctgatccagcaggtctggggtggatccaggaatctgatattttaaagctccccaagtgattccagggagtggtctggagccagactgcttgcatttgaattccagctctgcctgttatcactgtgacctcagccaagtaactttgcttctcttgccttcatttcctcattcgtacaatggggattataatcgtgctggaagaataaaatgaatcaatgcatttatgcttgaaaagcacttagaagagttcctggcacagagtaagcactcaaaaagagttggccaccaccgccatcatcatcatcatcaccatccacggcagcaccaatgctttaccaacgctttcactttacacactgaaactgagaaccacagaggggtgtggacatatccagagtcacacagcaagacacaggtggtacagggaccagaagcccagctccctttccccttgggattgtgttctctcacccacgtggctggctagccatcctgcccaatgtcccagtcacatgctgggggacagggtggggaagatagtctacagagtggggactttctgaaggattatattaggttggtgcaaaagtaatcacagtttttgtttttgccattacttttaatggcaaaaactgtgattacttttgcaccaacctaatagaactggaagtgttggcatttgcctttcgcccaccatagcaattctctatcctcctcctcacccttgaagggaccagccaggccctctttcccacttttggagtaagaggacgggaatgacttgagtcacctctagatttctaaagttaggacaaatatcatatcgccaatgatcaaataccaccaattctacctccacaatgtcttttgtatccaagacctctgccatacctgaggcctggccgccatcatcgcatgcacctgggcggctgcaccagcccctccctggcctccctgctgccaatctggctgcttcaattcactctacataccaccctcctcaccaccccttggagggattgtttaaacccccaccccccctgctatgtatgagtggataaaaatgtgatatctacatacaatggaacattattcagccttttattttattttattttattttattttattttattttatttgaggcagggtcttactctgacacccaggctggagtgcagtggcatgatcccagctcattatagcctcaacctcctgggctgaggtggtcctcccacctcagcctcccgagtagctgggactacaggcatgcaccaccaagcccaactaattttttttttgtatttttttgtagagacagggttttaccatattgcttaggctggtctcgaactcctgggctcaagaaatcctcctaaagtgctggaattataggcatgagccctcacacctggcctccttttttttttttttttttagtcagggtctcactctggcacccagactggtgtatagtggtgcaatcatagctcactgcagcctcgacctcctgggttcaaatgatccccccacctcagcctcccaagtagctggcaccacaggtatgcaccaccacacccagctaattttttacttttttgtagagatgggggtctcactatgttgcctaggcttgtctcaagctcgagacctcaaatgatccttctgcctcagcttcccaaagtgctaggattataggtgtgagctcatgcctgactattcagcctgtaaaaagaaagaaatcctgtcttatgccacaagatggatgaaccttgaggatatcacgctaagtgaataagccagccacctacatgagggacctaaagtagtcgaactcctagaaacagaaaacagaatggtggctgcccaggacaggggaaacgggaagttgttcaagggggagagagttttagtttcgcaagatgaaaaagttgtagagatctgttgcgcaaaaaggtaaatacacttaatgctactgaaccatacactaaaaaatggttaagatggtaaattttatatgtttttttcttttctattttttttttttttttgcatttttagcagaggtgaggtttcaccatgttggtcaggctgtcttgaactcctgacctcaggtgatccacctgccttggcctcccaaagttctgcgattacagatgtaagccaccatgcccagcctgtttttttttttttgttgttgttgttgtttgtttgtttgttttttgagacagagtctggctctgtcaccctggctggagtgcagtcacaggatcttggctcactgcaacctccacctcccaggtgcaagcgattctcatgcctcagcctacccagtagctggtattacaggcgtgcaccaccacgcccggctaattttttatatttttggtatagatggggttttgccatgttggccagactggtctcaaactcctgacctcaggtgatccgcccgcctcagcctcccaaagttctgggattacaggtgtgagccactgtgcccggcctgttatatgttttttaccacaattaaaaaaaaaaaaaaacacctccaagtctccccatcacctttagggcgaacccagatcccttgcctagctttggagaccttctgcactgttgccaccctcccaccaggcacttcaagctaccatgtcctcagcccacagagctcttcagcttttccccgacacggctcacatttgctcaccagtgagtttctccctgacagctttccatctggaatgttcttccctcagcttgtcaaccttttgaaatcctcattatccttcaagaaccagctcaaatatatcctcctctgtgaaaccttcttttaaccctctccttcaggaagaattaatgcccagagtgtgtgcccctgctttttttttctttttgagacagggtctcactctgttgcccaggctggagggcagtggtgtgatcacggctcactgcagcctcaatctccagggctcaagtgattctcccacctcagcttccccagaagctgggactacaggagtgcaccatcatgctcggcacatttttgtaaattttttggtatagatggggctttgccatggtgtccaggctggtctcaaactcctgggctcaagagatctgtccacctctgtctcccaaagtgctgggattatatgtatgagccattgtgtctggccccccgtaccttttttttttttgagacggagtctcgctctgtctccaggctgcagtgcagtggcgatcttggctcactgcaccctctgactcccgagttcaagcgattctcctgcctcagccccgcaagtagctgggactataggcgcgcagcaccacacccagctaatttttgtatttttagtagagacagggtttcaccatgttggccatgatggtctcgatctcttgacctcatgatctagccaccacggccttccaaagtgctggtattataggcgtgagccactgcgcccagcccctataactgttcacatcaccaccaccaccaccaccactgcctcagctaccattgaatgggggctttctacacactgagtaccaggccaaacaagctgtatgcatcagtggctcagttaatcttcatgaaaacccacaccgtcctcattttacagacgagaaaactgagactcagatagggaatgtatcatgcccaagatcacacagctagtaagttgtggcactgagacttaaatcttcctaattccagagaaaagcatctgacaactcagttctgctcccccacacacctgagtaattgccttgtccgtataattatttgtttttctgcctgcccaattaggggagggctgtgccttaacccttctggctctgatgccccatgcctggcccagggcctggcacaaagcagatgctcattttgtgggagttgttttggacaccttggagtaaatcagtgccagtgctagctcctctaatttcaccacttctattaaccctccaggaattggcaggttggtgatcacaaaagaaacattccccagccgatcaataaataataatgttggagaatttaaaataagaatctggattattaaagttacaaatctttggtctttatacctttaataaaacatgcgtctattaataatgaatactggttctggcctgcttaggctgaaagggagaaaaaatgaccagtgaaaagatgctaatattttttctccttacttgttttggctgccaagatgctgcatccctgacaaatggctcatcatttaaaaaggtttaaaaagtttaactgcacgaaagggaaattgaagatgggttgttcagccttgtgggccctcagtgaggagagattgtttcttcttgagacattctctctctggttttggtgggcccaccttctgctggtccttctccttgacctctggttgtctttctcaggctcctcattttttggtcaaactctatcctgggttccctccccttccctccctttctctcccttcccctccccttccctttccacttaactcccttaccctgagtgacctcatccacttctgtgaccaccagtcatcatcttttgcacgaaggaagtcactcagtaggagagatgatcagagcggtaaacagggggtcagaccatttggggccttataggccagggtgaactttggctttaactccaagaatcctggtgccactggaggcacagaggatggcatgaaacaaatctctttggaggctgtcattaaaatagactaaagggtgacaagggcagaattaggaaaaccagttaggagaatattgccgtaatccaggcaagaggtgatggtagtttggaatagagtggaagcagtgaggagctgaggttggatacaggatatattttatttttttaaattttaatagagacagaatctcactctgtcactcaggctggagtgcagtggcacgatcctggctcactgcagccttgaactcctgggctcaagtgatcctcccacctcagcctccccagtagttgggactacaagtatgtgccaccgtccccagctccaggatatattttaaaggtagaggtgataggatttgctgagggattggagtggggtgtgaaaaaaaaaagggagagggttgtctccagggtttttggtctgagcaactaaaagatgagtgttttcattttctgagatgaggaggcctgtgggtagagaagctttgatgataaggagttgagtcttggatgtgtgttgtctgagatacctgttggatatctaagaagagacatcagattgacaattggacatatgggtctagagttcaggagaaaggtccaggttagaggtataaatttaggcatcatgatcatagatgtggtatttaaagtcatgaagctagatgagattgccagtggaggtgtatggcagagtgtgaaaaaggactggactcatgactttcctatgttttaaggttggagagatgaggaagaatcaacaaagaagaatgtgaagaggccagtgagctaggagtaaaactaagaaagtaaaggatcctagaagtcaaacgaagaaagagtttcaagagggggaatgtcattatgtatgtcaagtacggaaaatgggttaaataaggtaaggactgaggactgaccattggatctagcaacatggaggtcattggtgatcttgatgagggcatttaacctcactttgggccacttgatggtgaaggtaaaaaggaaagccagtagattccataactctcattattgtccagaaggaaatctaccagttgttcaagacaccccaacttgtcctgggagcttgtcatttgagttcttcaaaggaggcattgaataatacagctgactcttgcacaacacaggtttgaactgcatgggccctcttatatgtggattttttttctaccaaatgcagattgaaaatacaatattcacaggatgccaagtatgcatatatgcagggctgacttttcctatgcgggttcctcagggttgacttcaggacatgagtttgtgtggattttggtgtgcgcaagggagggaaagtatcctggaaccaatttcccacatctactgagggatgactgcataatgaatattgtcagcaagagttttatagcagagccataggtcaacgttttactcccaggatataagcggtgctgtgggaagcatggagtgggagagattgtcatgttgagtatttatcactccactgatgcatggagtgttccatccagtttgagactgggctctgcctcctggagaagcgacagcagccaggtgccactctcatggagaccaagagttagtggcctatgtggagggccacaaggccgccctgttacacaactccaggcaacacatctacatcatggtctatgtgaaatgagcttcctggtgttgtgcagtgcacaaactgcgctgctgtacgaaacaggcctgatgtgacaagaggcagctaagggtatccccagaactcccagagggatactgggacactgttgtctgaagaagggaaagtaagtgatggaaggcaaaacaaaagatgctcacatcctaacacgaaggacaaattccagatggaaataaggcacatgctctctttattctttaatcccccaaacttcaaaaggaattttattgttttcttcctgccatcaaatctgtgacttgttttaggggaaggacaaggtacgtgtgtgtgtgcgcgtgcatgtgtgatggggtgcggggttatatagcctctacccttctctcctttctctccaaaattcctaactgggaggatttttctagtcattggaggaaaggtgtttgggaatatattaattagagcaagcctaagccgctgtaataaagaggtcacaaaatacagtggcttgaagaaaagagaagtttatccctctcatgtaacagcctcaaggttaagtagtgcagggtggggagatggctctgttccacatgatcactcaggtatcaaagatcctttcatcttgtttctctgtatccttcatggtgttatcttcatccccattgtcagaacttggtcaccgcacatctatgttcagggaaggagaaagaatgttaggaaaaaggtgccccatcccttctgttcatatgccattggtgacaacttaaccatgtggccacactggccacaaagaagcctgggatgtgttgttgctagctggggaatcagcatttgttcagtttaagctctattactgtggaaaaaacttagaatgggttaaagtaagtaactggcaaaaactggttctttttgctctcatctcttttctaagcatttttatctctcaaatttagaaatggaaaatttgggccaggtgcagtgattcacgcctgtaatcctagcactttggaaggccgaggcaggaggattgcttgaggccaggagtttgagaccagcctgggcaacaaagtgagaccccatctctccaaaataaccttaaaaaattagccaggcttggtggcacatacctgtggtcccaactattcagaaggctgaggcgagagaatcacttgagcacaggagtttgaggtcgtagtgagctatcattgcaccactgtactccagcctggatgacagagtgggaacctgtctctaagaagaaaagaaaggaaagaaagagacagcgagaaagcaaggaaggaaggaaggaagggagggagggagggaaagggaaagggaaaggaaaggaaaaaggaaagaaagatactgaaaatttgaagattctttccgtgggtccctttctgaccatttgacctaggtacatgtgccagccctgtgtatccattccagtcataatgtggagggtcctggggttaaaaggtatatgaaaaagagtcttatcagtcaagctcgcatgtcaacccacaataatgaccgtaacaatgaataacaacaattataattattaacatgtttagtttacacatagatgtatcacttataatgctctgtaatttatttttagtaatatgtacatgacttttccataagtcaaaagtcttgaaggactgactttctagggagaagaagtgactcactttgcctggagagctgggaaagaggagccactgagatgggctttgagaggatgactaggaatccccagagagaaaaaagagagcaaatggaattttacgaatgagaaatgttaatagcatgtatgaactctagcatgtactttcagtaaaacaaaatttttctttttttctgtttttatgactttgtttctcttcctctctctctctctcttacacccattaatggacacaccatgtaactgttagatttcttgtttgcaagtgacagaaaactcacctcaaaaatatcttaaatcaacaaagggaatttattggctcatgcaattgcaaagttcaagggtaaatttaagatgtggctaaactcagaggcccagacaatagtaccatgacctggtctttctccaccatctggctcggccttgctgcatgccagatgagcattcacacccacatggtgccaggatggctgccagctacgtggggtctaagtcgtcttcatctcaatggaaatgaatggagagcctctctctccattgtgccccattggctctgattaggtcaggtgatcatccttgcgatgctctcacgggctacaactgagacacgtgccacaactgagacacgtgccaacccctaccagcaggggtagagtcaactctgtctaaagctagggattgagaactgggagagagtgatctgctgaaggaagaatttgttactgaagaagggtgaggccaagtgcatggctcatgcctgtaatctcagtactttgggaggctgagcagaaggatcacttgaggccaggaattcaagaccaggctgggcaacaaagggagaccctgtctctacaaaaaaattaaaaattagctgggcatagtggtgtgtgcctgtagtcccagctactagggaggctgaggtgggaggattgcttgagcccaggaggttgaggctgcagtgagctgattgtgccactacactccagcctggcaacagagcaagatcctatctcaaaaaaagtaaaaaaaaaaggccgggcacggtggctcacacctgtaatcccagcactttgagaggccgaggcgggtggatcacctgaggtcaggagttcaagacctgcctgaccaacatggtgaaaccccatctctactaaaaatacaaaaattagctgggcatggtggcaggcgcctgtaatcccagttactcgggaggctgaggcagaagaatcacttgaacctgggacgcggaggttgcagtaagctgagatcgtgccactgcactccagcctgggcgacagagcaagacttcgtctcaaaaaaaaaaaaaaaaaaaagtaaaaagaagaaaggtgaatggccctttggccacaaaagccgtttccatcttccatggagtgggatgctgaggatctcactgagatactggattcctacctattgtggggaaacttcagtcttaaagactgaatggccctcagagcagaggaacctgcaggtgaattgagctctgaagcacaacaaagtggaaggctgggaaatgcggctggtccagggcttagcagtcatccagcctttccactggacagatgaggaaacagatcatagagggtgagggacttgtctgagcaagttgaggcagagcggggacccaaaccccagtgatgtgaaagccagagccaggctctgtctgtgggtctggcagctgccacatttattagctccctgatatctccttgtttccttgtatatttttacaaggttgttaattaccagccataaagctcggcaaacattctgataggctttaaaggctcatgaaaacagcattacattttaaggcatggtttccttattaatctaattaactgtcagcctcacatcctgctggtttccagatgaagcgagctgtgcctttcagcttccgattcagccccagtggacaaggcttggggatgtcatcgccacaatctctgagccaggaaagcagctcacacaggcccaaggtgtgggttgctgaagcagtgtctagatgctcagcatcgtgcagatttatatctcaggatgatccatctctagaacaaagacatgatggcttggaaatagcccagattacagcaagtacatggatgcctcagctcaggaccctcccaggccatggtgtagacacttttgggtgaccttccccagtgaggctccctttccagagctctgtcctcatttataaccctgaccctggcaccctgctctcccacagcagctgtttggactgagatggacacctgacccaaagaaggctcagtcacctctgacctgtagcctggcttgaaagaggggctgggccaaccagaggcaggtctggagatagagaactagaactgggaaagagtgtcttcatttatgagggccgccgtcacaacataccacagactgggtggcttaaacaatagaaatggatttctcacggttctggacactagaagtgtgagatcacagtgccagcaaggttggcttctctctccctttctctctctctctcttttttttttttttaggtagggtcttgctctgtcacccctcaaccttgtcgggctcaagcgatcctcccacttcagcttcctaagtagctggggctgcaggcattgccaccatgcccagctaatgtttttcttttttttatttttctttttttgagactgagtctcgctctgtcgtccaggctagagtgcagtagaactatctcggctcagtacaacctccacctcctgggttcaagcgattctccttcttcagcctcctgagtagctgggattacaagcacccaccaccatgcccggctagtttttttttttttttttttttttgtatttttagtagagacgggggtttcaccatattcaccaggctggtctggaactcctgacctcaagtgatccgcccgccttggcctcccaaaatgctggaattacaggcatgagccactgcgcccagcgccagctaatttttttatttttgtagagacagaggtctccctgttttgcccgggctggtctcaaactgctgggctcaagtgatcctctcgcctcggcctcccaaaatgctgggataacaggcgtgagccactgtgcccagggctggcctctcttggggcctccctccttggcttgcaaatggccacgttctcactgcgtcctcatggggtctttcctctgggtgcacatccctggtgtctctcttgtgtgtccaaattttctcttctcccaaggagagtaagctctgattatggctgaccctaatggcctcattttactcaatcccctctttttaaaaaaatttttttttaaatttgagacggagtttcactctcgttgcccaggctggagtgcagtggtgcgatctcagctcactgactgcaacctccgcctcccaggttcaagcgattctcctgcctctgcttcctgagtggctgggattacaggtgcacgccaccatgcctggctaatacaatcccctctttaaaggttctatctttagatagaagacaatatttaaaatattgtcttcagatacggaggtactggggattaaggcttcaatatatgaattttaggggacacaattcagcccataacaaagggcttgagatgaaaattcacacagcatctgggctggggcaagggagccaccatggctggtgccctgcctatgtctgcaagaccctcagctctaccccctgaaggtataatcgcaaacacctgccacctcccacctgagggcttttatctggctgctttctgctgagggcacgtccacctgcatgcagggaaagcctactagagggttaatggccagaagcagccctccaccaatgactgatgggatacagacccagctcccttgcctggggtggggcaactctgcttccatgatctacactgtctccagcatccccgggcaggaatgggctcccattgcccacggggtaactggcttgatcatgtgcctttcttttctctgtctcactttgccactcccctactggtacttcctgggatcacctcccaagtaaatgacttgcccttgaacctctgtctcaaggtcagcttctgggggaacccaaacagttaggtggcatgtggacatgatgtggagatacgggcagaggaagctggcgtgggaggggagagagggaaacgtggattccaagagagggaaagggtttctgggttcctgagtctctagttctggtacctatgagcactgccctgtgcctctcccccgtggctctccaagtagttacataagtggggtgttaggtgttctggaacctaagctagtttagcctcttccctatctagatgcagcaaattctcttggactcttccagattcttccctcaaatatggaattatcaggcaagttgatgcctcttgctctgggggaaaggtagccccaagacattctgtggctatgtaaatatgccccccaaaataaatccatggtttgtagagtgaaagttgagcaaatctgcatacaggccaggagctacccagaaggtcaggaatcgaggccacatgcccttttcttttgaggtaaaacatgatcacaacctttctggttaattgtgatgagcctgactgaggcccctggaggaaaaaaagatgtaaagacccacagggaaaagaaccgtacctgtgggagtctgcactaatgactagtgttaaataccaacttcttccgtagctgcttctggttatgacttcaagtatgttttctcattctcagcataattgaaaggcgtcaaatgattaacaccagaggttaagatctagaacaattttgtccaacctgtgggctgcaagcaccccagggcagctttgaatgtggcccaactttcttaagatgttatgagactttttttgtgatgtataaattatataagctcttcagctaccgttagtgtattttacatgtggcccaagactattcttcttccaatgtggcccagggaagccaaaagattgggcacccctgatctagaagttaggagtctttcaggaagctaagaataacttacagacacctgattctataactctatgaaacgtcttagattctttggtcttaaaatagtattggcccaggcgcggtggctcatgcctgtaatcccagcactttgggagggtgaggcaggtagatcacctgaggtgaggagtttgagagcagcctgaccaacatggcgaaaccccgtctctagtaaaaatacaaaaactagccaggcttgggggcaggtgcctgtaatcccagttactcgggaggctgaggcacgagaatcacttgaacccgggaggcagaggttacaatgagctgagatcgtgccactgcactccagcctgggtgacagagcaagactgcctcaaaaaaaaaaaaaaaaaaaaaaaaaaaaaagtggagtacgatcataatctgtgtaggcaggagagaggaagcaatggagccagcagggtctcgagtcagagaggagtgggagtggttgggttggctggcttcaagactagaggggttcttaataatatagggtgctatagtcacaagtgggggtgcatcccaggtgttagcagggtccaacccttgggtctaggggtagcatgatatttatgacaataatgatggtgaacatgataatgggcatgaccactcctgtttacaggtgagaaaactttacccctctcagcaggactgtcaggtccaaggagtaaaattggaccctaaaaaataggattcaacagtcctatttgggtcagggtgaactctttggcaccaaggctctggacactttgagggtgaagccaggtggggtggggctggttctggggaagggctggttctggggaagggctggttctggggaagggctggttctggggaagggctggttctggtggcctgagatgcagcaggactgaacaggactgtccttccagtaacctccatccttcctcatcgagcatgtcccaaccccaaacctgtttggcacttgcctgatggatttaaattgatgccctcaaaactgcaaaactagggccagttctcccccctttctgtccacgcaccttcaagaatttaatgagcttgtctaggttaaaatgtgttattcaagcccaatgtttgtggtatcactgaggaagcaaatcccaaactaatagaagttgcatgtaatgtaaaatagcaattaatctccatcatgaagggtaagaaaaattaacaaaccgctgttcaaatatttattaggaggagagactggacagatattcttagtctattactgggggcaattgaaatacaaggaaactgggctgggcgcggtggctcacgcctatagtcctagcactttgggaggccgaggcgggtggattacctgaggttgggagtttaacaccagcctgaccaacatggagaaaccccatctctactaaaaattcaaaatcagctgggtgtggtggtgcatgcctataatcccagctactttgggaggctgaggcaggagaatcgcttgaactcgggaggcagaggttatggtgagccgagatcctgccattgcacccaagcctggacaacaagagcaaaactctgtctcaaaaaaaaaaaaaaaaaccaaggaaactgtctggtccgtaactgggcatggggatggggtgggcttagaaatgattccagtaggtgaggggttcagtgccagcccaggtgggtggggaggggtgagacctgtggtctctttgacatattagagtggtgggcaacttctggatgcttcttctcacctcttcttgctgaaatcaggttatggttgttcagcctgacatgatggccatcttcgacacaggcaggaggattctggcccctgctccagccagaggtttagccctgaaccccagccttgacccctcctaccgttgtcctgcctctatgttcccttcatctacctcctctttttgatggccttggcaattcttttttgtttttttttgagattggagtctcattctgtagcccaggctggagtgcagtggtgcaaccttggctcactgcaacctcggctcactgcaacctccacctcccgggttcaagtgattctcctgcatcagctagagaatcgagtagctgggattacaggcacccaccaccacgcccagctaattttttttttttttttttttttgtatttatagtagagatggggtttcaccgtgttggccaggcttgtctcaaactcctgacttcaagtgatccgcccacctcggcctcccaaagtgctaggattacagttgttagccactgcaattggcctaggcaattcttaacaactctggatttttccctacaaatgctgagccactcccacaggattaccaaccacctgtcctcctcctaccaataccccacctaagacctagataaaggtgatgataaaggctggcacctggaaaacaagggttcaggcttcctttcccagctgagggagatgcctccaaagatggccgccaacaacgcctcctgtccctggacacgcaggctcctgtcaagaggtggcactatttctcctccctagaatttgggctggccttgtgacctgctttcacttgtgccggttccatgcctggcttgtaagaggcctagcagcttctgttctcttggagccctgagccactgagaaagaaatccaactaaccttctggagacaggcccagccagggcccagccggtccaactactccttgacaaccaaggctgccacaaagacaggatagaggaaggaacacagaggcagggcaatgggaggagccatttaaggctgaggttcagggatgagcccctggatagggaaggggccagaacctttctatgtgtgtcttgaatgttccagctccagctgaatgtgggagtgatccccaaaaataccttgtggagcagaacttcccgtctgcgtctggacatcccttagaaccataagaaataactgtaatgaaggccaggcccggtggctcacacctgtaatcccagcactttgggaggctcaggtggataacctgaggtcgagaggttgagaccagccagaccaacaccgagaaacccagtctctactaaaaatacaaaattagccaggtgtggtggcgcatgcctcccagctacttgggagcctgaagcaggagaattgcttgaacctgggaggcggaggttgcggtgagctgagattgagccattgccctccagcctgggcaacaagagtgaaactctgtcccaaaaagaaaggaaggaaggaaggaagggagggagggagggtggactgtaatggttaatactgagtgtcaacttgattggattgaaggatacaaagtattgatcctgggtgtgcctgtgagggtgttaccaaaggagattaacatttgagtcagtgggctggaaaaggcagacccaccctcaatctgggtggatagcatctaatcagctgccagcatggctagaatataaagcaggcagaaaaaagtgaaaaggtgagatgggcctagcgtcccagcctacatctttctcctctgctggatgcttcctgcccttgagcatccaagttcttcagttttgggactcagactggctctctgctcctcagcttacagacggcctatcgtgggaccttgtgattatgtgagttaatacttaataaactctcctttatatatatatatatatacatatatatatcctatttgttctgaccctctagagaaccgtgactaatacaataaacatcatcattttaagccactgagatttggagtggagtagcgtattaaatagcaataggtaactgagactccagcccagctaggaccagtctggcacccccctgccattttggatgctgcaaactatacttggccaacttcaggatccccagttgacacctacatggggtctcctgctgctgaccacctgtcagggctgctctgcccaccaagcttcaagcggaagctcatgccattgttcaacaaacatggagtcgcacctgctatttaagccaatccctgtattggccgctgaggattcagagacacactcctggcctctgaggagttcacaggcccaaggggagtccggcaggaagataacatgctaaaagtcagggtgcagagtgtgaaatagtagcaggacacagtcccaggcaagttcaggaggtgggagtggcagctatgccccagtaggcttcatggggttgggtatttgagtggtcagcagggagttctccaggcaggttgattttgtgctgtcccctgtggcccttctcaatgccgttgcctgccctctgaccccctgctccccagccctgggcctctgtgcttcacccaggcaggttttgccctcactggagccaggctctacagccaatggaggattttaagcagaatgacatggtggttgatgttaggtgaggattgggaggaaccagagacctggccagagatggggagctcagtgacaaggcagttgcagtggttaaggtaagagaatcgtggtggaaaaggagcaaagatctgtgccaaggggagagcctaggattcagaggagccaggcaaccaggtcaaagtgcatggacccccaatccagtgctgattccactgtagagcgaataaaaagtaattttaaaggttaaaaatacagatgagtacgtggaggtaaatacaaggatgtcctcgggagctgtgattgtgatggtaagaagttggaaagaatctgtctatcaagaggaaaataattacataaattatggtaattcttacgatagaacattatcaaggagctaaaaggaatgaactcaggcatatgtaacaacatgagtaagtcttgcaaatacactgttgcataaagaaaagctgcataatgatatatatggtaaaaaatccacttatttactaaaatatacaaaataatattatatattttctatgggttcctataaaatgcgtgaatatatttttgaaagatctggaaggcacttgccaagttcaatatttggaaaggggccatggaccaggattgcagaaggtgggcaaagaaaacttgtgctccgttcataatttttttttaaagaatggttccattttactgacataattaaatattaattaaaaatagaaaacaatgaattaaggatttgattcataggtattgttaatcccccaaaataatcagctcagaccttcaccctctgatccctcaagggagctgaagtcctactaccagacactcattctgtgccagcgtctgggtggcgggagtgtcactgaggaaaggaggggatgagagtgtaccgaacccctgttgtttggcatgttgtttgttggcacatgacaaatcttgtgtcattgaattgtcacagctaccctaagccgtgggggtggggggggcgcgggtatgacgattcttattgtacagatgagctgcgtgcatttgggaaattcagtcaaataaatagttcaagatcacacagcatgcaagtggaaagatttgaacccaggtctgtattgtcccaaaagccataccctctcctctgtaccaaggaggaacaagaggacagacaggcatggaatcacctgggagctttcaaagcacacaggtgccagatcctgccctcagagatgccgatgtgattgacctggggtggggcctgggcttttttttttctttttttaaagctgtgactatgccctgccaggcttgaggacaactgccttaactggagtccagctcattcctctcagatcagccaccacggggtgactctttcaaccgtgcctcccattactcaagggctgtccttttggacaatgactttgtgagaagtgtttattacacttgggtgcattttaaaaaggtggctcacaaaccctgtctcagatttgagttcccattttctcactgtttttttattagagaattcgagacgggttcttcaagaaaaaaaattaccctaagaaataaccaccttatagaacgagcaggatcatgaataaaaaaaaagaaattaaaaaaataaccagtaataattttatgtattttattttactttatttatttatttgagacatagtcttgctctgttgcccaggctggagtgcagtggcacactgcaacccccgctgtagaactcggctcactgcaaaccccgcctcccaggttcaatcaattctcctgactcagcttcccaagtagctgggattacaggtgcacaccaccatgcctggctaattttcgtattttagtagagacggggtttcaccatgttggccaggctggtcttgaactcctgacctcaagtgatctgcttgcctcagcctcccaaacttctgggattacaggcgtgagctaccatgcccagcctaattttatttattttaaagtcagcgtttcctagacctcaggcatttgggagacagcttcacatttgccatgtttgtatcaccactgttaatttacttaacatttcactttaaatcaatacatagttcataaacttaaaaacttttattttaaaagataactgtgtatcatcactaaaaatgaaaagcaaaaatacttgtaataaacacataaccataaaaataaaacatggttactttgtgtcctacctaaaatttaggagctcatataccaccagtgatgtgtgtcctgtattttgggaaatagttataaatactaaattgaaaagactgaaacttttagataaaatcttaatgactcctagggcatttctcacatggattattgccagatcctcctaactgaccttcctgtttctaagctcatcacccccattccccacctattttcctcccagcagacagtggtatcttttttttttttttttttttttgagatggagttttgttcttgttgcccaggctggagtgcaatggtgcaatcttggctcactgcaacctccccacctcctgggttcaagcaattctcctgcctcagcctcccaagtcattgggattacaggcatgtgccaccacgcctagctaattttttgtgtttagtagagatgggggtttcaccatgttagtcaggctggccttgaactcctgacctcaggtgatccacccacctcggcctcccaaagtgctgggattacaggcgtgtgccaccacattgggcctggtattctttaaaaatttacatcagatgatgtcatttatccatccaaaccctccgtttgctctcatctcattcagggtaaaagatatagaacctactatagctgacaccttttctacgcaaagtgaggtccatcggccagcagtatcaatatcatctgagaactggttaggaatgcagtatccaggcatggtggcatgcacctgtagtcccagctacttgggaggctaaggcaggaggatcgccaggagttcaaggctgcagtgagctatgactgcaccactgcaccccagcctggatgacagagtgagatctatctctaaaattaaaaaaaaagaaaaaaaagcagaatctcagatcccaccccagacctgaatcagagcctgcattttaacaagatccccaggtgattcataatgcacattaaagtttcagaggcaccttagtggtctcctcacctaccacagtccttctcccactgcctcagccaccaggcttccttgctattcctctgccacaccaatcttgctcctacctcagggcttttgcacttcctgtttccctgcctagaacacttgccagagcctgggttccccagaaagcagagccagaagaaagctcatagtttgttttttgttttttcttttttttgagatggagtctcacggtgttgcccaggctggagtgcagtggcgtgatcttggctcactgcaacctctgcctcccgggttcaagcgattctcccacctcagcctcctgagtagctgggattacaggtgtgtgccaccatgcccagctaatttttgtatttttagtagagctggggtttcaccatattggccaggctggtcttgaactcctgacctcaagtgatccacctgcctcggcctcctgaagtgctgggattacaggcatgaaccactgcgccgggccagcttatgtttattacgtctgtgtttactcagggtgtaatcccaaggaaggaggaagagccaatacaagggtgcacaaccaaccaggtcaccacttggcatagagcatgactgattgctcaatctcctggaaatgtcttctgtgagagcacatgaataaagccagctcagaacaatccacccaagggaaaaaagggaaaggaattcatccacctgcttccgctcccactaggtaaatgttcactagtggggcattgatatggtttggatttgtgtccccactcaaacctcatgttgaattggaggagggacctggtgggaggtgattggattgtgggggcagatttctcccttgctgttctcatcatggttatgatgagagtgagttattgtgagatctgatggtttaaaagtgtgtgtgacgctgtgagttctgatggtttaaaagtgtgtgatgctttccccttcactgtctgtctcctgccaccatgtgaggaaggtacttgcttctccttcacccttctgccatgattgtaagtttcctgaggccttacagtcatgctttctgttaagcctgtggaattgtgagtcaattaaacctcttttcttagtaaattacgaagaaattcttgggtagttctttatagcaatgtgaaaatggactaacaccggcattaaccccctcactttcccagtggctcaggcatgggctcccagcaggtcccaggtcatctcccacctgagtgtcaatagggaatctccggagcaggaggcaaggacaggcggcccaggcatgagatcagtgagagcccacacacagctggccacagagcagcggcaactaagctggaaccagtggccaaatctgtggagccaggggaggcccggaggactgggagtgcccatgagcagtacttgctaccaagctcctccctgagatggctcttggctcgatcctcactttcctcatgagggctcaagtgctgccctcacagaacccttccctgatcatttttacattttcttgtttaattaaattttttgttttgagttggggtcttgctctatcatctaggctggagtgcagtggtgtaattacagctcacgtgcagtctccatctcaaaccatcctcccatctcaaacctctcaagtagctgggactacaggcacgcagcaccatgcctaactaaatttttgatttttagtagacaggaggtctttcaatgttgcccaggctgatctcaaactcttgagctcaagcattcctcccacctcggcctcccaaagttctgggattacaggtgtgagccaccgcgcctggccccatgatcacccttttaaacattgcagctgccttgtctgcttgagtcttctccagaccactcatcaccttctgatgaatgtgcactttactttaaaaggaatgtggtcccattgggggaagagtttttttggcctgtttgttcactgatgggtctccagtgtcttgaacagtatgtggcacctagcaggtgcttggtaaatatttactgaatagcttgaacaaagggcggaactggatggagcctttggaagtcattgagtttgccagtctttaggtttatttccaatgaaatctgacatggaagccccattttgaaacagatcaaagagagcaacagctgagccctctctgcaggtgtcctgggcatacccgctcctatgctggtgacagaaaaactgcccagagaggggatgtccctttcccacataactctacactcaaaaatcacagatataaataagcgagagtttctttttctgcttgaaaggcttacttgaaggcctaaaaagaaaacaagaatgagcacagcctaaatgaatgttccctgggctgagaattctcccagtatctgcaaaatcctttccacaacagaaaatcccaagttctctacactgaattagattcatgggaaaccagagggatcagtttactgatgctagaagaaagctttttattttattttaatttttaaattaattttttttttgagatggagtcttgctctgttgcccaggctgaagtgagcggtgtgatcttggctcactgcgatctctgcctcccagattcaagcgattctcatgcctcagcctcccgagtagctgggactacaggtgtgtgccactgtgcctggctaatttttgtattttgtacatttatttatttatttatttattgagacggagttctgctctgttgcccagcctggagtacagaggcacaatctcggctcactgcagcctccacctcccgggtttaagctattctcatgcctcagatcccgagtagctgggattacaggagcatgccaccatgcccggctaatttttgtatttttagtagagacggggtttcactatgttggccagactggtcttgaactcctcacctcaagtgatccgcccacctcggcctcccaaagtgctgggattacagatgtaagccactgcacctggcctattaatttttttttttttgagacagggtctctcactgttacccaggctggagtgcagtggcacaatcacagctcactgcagctccgacttcctgtgctcaagcgatgctcccacctcagcctcccgagtcgctggaacagcaggctcgccaccacacctggctaagttttgtatttttagcagagatggagttttgtcgtgttgcccaggctgttctcaaactcctgggttcaagcaatcctcccacatcagcctcccgaagtgctgggattacagacatgagccactgcacccggccaaaacatattattttataagcagtgtgcgcataatactgtctataggcagatattagaattcttccttgagaaagaactcctcttttgtttgggaaaatatttcaagagacctattgattatgcaaagaaatgcctggggagcgggtgagacacctgctaggggggccagtgttgctgcgctttattaaataactgggattttcagctctccctaagtacttaagtactgtctatggcatttgcctcatgtatctttgctctttttttattgttaacctttatttagcactttgttttaactgatttttgtaaatggcatgcagagggcagattggcaacaggccagggtgaaaggagtgacattcccaggtgggggacattggctacagcaatgtctaacactcagttcaagagattacttattctgtgatggcacctccttgtctttgttctcaaatcttcagtatcggttgaaactctagtagtgggttgaattgtggccccccaaaaagatatgttcacatcgaaatccacggaagctgtgactatgacttttttccggacaaaaaaaatgctttcacaggtttaattaaggatcttgagatgagatcattctggattatctgggtgagccctaaatctaatgacaagcatccttacaagcaacagaagaggccgggtgtggtggctcatggctgtaatcccagcactttgggaagctgaggcaggtggataacttgagcccaggagttctagaccagcctgggcaacatggtgagaccctgtttcttttcttttctttttttctttttttgttgagatggagtctcactctgttgcccaggctggagtgcaatggcgtgatctcagctcactacaacctctccctccctggttcaagcgattctcctgcttcagcctcccaagtagctgagattacagacaccggccaccatgcccagctaatttttgcatttttagtagagatggggtttcaccatgttgcccaggctggtctcaaactcctgacctcaggtgattcacctgcctcggcttcccaaagtgctgggattacaggagtgaaccaccgtgcctggcctaccctcattttttgaatgtttgtttttcttctaaccagcagactctttactaaggcatgagaggtgaaaggggtccaagtggaaggaagatagaatgagaattgtttcctttttcttattttaattttttgagacaaggtctgtctctatcacccaggctggagtgcagtggcatgatcacagcttgctgcaacctcacattcctacagtcaagcgattttcctcctcagccccttaagtagctaggaccacagttgtgcaccaccacaccagctaattttttatttttgtagagatgagggcttgctgtgttgcccaggctggtctcaaactcctaggcccaagtgatcctcctgcttcagccttgcaaagtgctgggattataggcaggagccaccacacctgaccgggactgacaaccccagctctgggttgggctccttaggacgtagctctttgggcttctcactttctccacactccccagcctccacctactagccctgtccagaaactgaggtcttaacaaatgcctgcagtacatagaatacacctcggtgtttcttgttatttaatatttattggaatggaatgaaatagtggatgcagggtttgtaaacagatccctggatgtacggagtagccctccatttcataaaatggattttgaatttgttggagaggactggaggagtggagtgatgatgggatgtgaccagcgggtaactgccctggccacacctcaatatgcaatgtactgtggcctcgcagatttcacatttgtctcgacccagcacctggcacttagcaggtgctcagtaaacatgtcaggctgaattgtgaatctggcatgccatgcacgctcagtactgtccttagacccaggcaagtggggacccctgccccaggcctcaggggccccatgctttggagtgccttcctcaaaggaagtctctttctggtgtctgggactgggtggagtgggcaatgctattccatcctggtaccctatgaggtattcagtcaaggtcaccagaaacacctacctcaaaaatttctaaaaacccctctgggggctgggactggcagtgccatgtgggtggagttccccgagcctgaactaggctccagaggggctccttttcctatttctcctctttgaaatggtctccaaggctgggcatggtggctcatacccgtagtctcagcactttggaggctgaggtaggaggatctcttgagtccaggagtttgagaccagtctggacaacatgacaaaaccccgtctctaccaaaaatacaaaaattagctgggtgtggtggtgcatatctgtaatcctagctactcgggaggctgaggtgggagaatcgcttgaacctgggaggcggaggttgcaatgagcagagatcgcgccactgcactccagcctgggcgacagagtgagactctgtctcaaaaaaacaaaaaagaaagaaaagaaacctcggcattgcatgcaaatatttttctatcctattagattcattatttgttttttttttttttttttttttgagagacggagtctcacttgctctgtcatccatgtatatgtgatcatgccagaatgaatgagtctctagaatgctcccaacacacacattttgggtgactcttggttcagacccagaagtagttcagagctctgggctatcaatggcctggcctaccactgacccttgagtttcactcccgtgtagggcccatgcactgggtctcagccatttgcattcagactatgatgccacctctggtctgcagcacccatggctgcagggtggcaacaggcatccttactccgtgcactctctgctgctgggcccccacccctctgtaggcttcaagccatgtgtcagacagtcctctggtgcagctgggaccattcattgttctgcagctcccatgggctctttctaccaatgccctttcttgcctctgattgatatgacaagtcctgctgttctgggttggccttaagctgtgctggattggaacaaacattcctcacgtgagtggtacagttcttgctctattcatgagcccctcacctatgctccctactggtagtggtatgtgggaggcagcgggtgaggtcagcattgaaatagatcacgtttcaggaatgcagtgattgtggcacaaagagttgaagagaagagatggttgggaaaagcgctgttctacattacatagtgtgttcgtccttttatgttatggtatacctgaggctgggtaatgtataaagaagagaggtttaattggcttctggttctgcaggctgtacaggaagtgtggtactggggtctgctcctggggtgggcctcaggaagcttacagtcatggtggaaagcaaaaggggcaggtgcatcatgtggtgacagcagagtgagagacagctggggagacgtgccaggctctctaaacaaccagctcttgcatgaaccatcagagccagaactcactcattaccatggggatggcaccaagccattcctgagggacccatccccgtgatacaatcacctcccaccaggccccacctccaacactgggaattacgcttcaacgtgaactttggaggggacaaacatccaaaccatatcacactgtaaaattccaaatggtaaatttaatatgaccagaagacaaatgatcattcatatattctctagactctggggaagacttcccttatggtcatcatcaatgaagcactgtctttgagtcattggaagcccagtactccccagtagcacaacggatgatgcaacctaatgagtaaccagcattcagtaaatgttgtcagggaaatgcagaggcaagaagatctttattgtttcaatataaacagagcctgaggagcctggcattgtgagcaataacaatgttgctgcttttttcttgtgttttttccttgtggtgggacatatgagcccagagccacacatttgacagtaaagaacaggaggagatggtgcctggatactgcagagaatcttcacatgcactaattgaaaaatactaaaatacctaagtacttcttctgtattcacaactctcaatcttcgtcaatacctcatcattcctcacatgggcccaataattttgtaatacattttaaaatcaaattgtttatataggcagggcttccaaaaacatattttccagggtcccatgcaccttaggcacagccctgttctcactttcagatgcaacgtcttccggaagctcacacatgggccccacatccatttatcctccttccagtatccatgcccccactttcctctgaaaaaaacactccctgcccataatcagcctgcatggaatctgatgaagcagagttgaccaactctggggatgaaagtcctgacttagccctaagccagtcagcatatctcattctgtggtcccagcacttggttcaggaatgggcatatgtcccaatcaaagtcaatgagatgcaatgaaacttttatttgggattctaggaaagggacactctcttccctgctgtacctgaaacctaacagcacataagagctggatctgttcccaccatcttgttgtcgcatgaggcctagaactcaagcagcagctgaagaagcaagtggagacatggtaagggagctaggacctggtgagctcatctgtgttcctgatcaagctgcacctgaagccaggacacacacttggaccataagccaataatatccccttttgcggaagcagttttggttggatttcttcttatttgcaaccagattaaatcaaatggataatcatgtctgagtgtaaatgcttttgttgtccatatactaatgccttctcaattctgatttttttggctgtctaacagaatgatgtcctgaagtatgcattaacctctgcctgattcctctttcttttattttattttctttctttcttcttcttcgtcttctttttttttttttttttttaatggagtctcactctgtcacccaggctgaagtgcagtggcatgactacaacctccgcctcccaggttcaagcaattctcctacctcagcctcccaagtagctgggattacagatgcccgtcaccacgcccagctaatttttttgtatttttaatagagatggggtttcaccaccgtattggctggactggtttcgaactcctgacctcaggtgattcatccacgttggcttctcaaagggttaggattacagacctgagccactgcacccggccctggttcctatttctacctcctccctgccccacaactgaggcctcttgacatttgctgcaggctcagcccctctccaattaccatggaaaaatcctgccctaagttggaggagtcaataactccagccccactgcagactcaattgagaacttctctctcatttcatagcctgtccagcctttccagtttataactgtattccctactcactctaaggtctgagtccaagtcatggtgtctgagatcttaaaaatagaatcatcagaatgacccgccttgccagtttcagggtacaaatatagccacctttatttcaattttccactcattcaagttctcacatactttttttagtgcaaggtcccaagacaccctctttaggcatccactgatccctggattttcaaagtctaggggataacttgggcttagggcatcagtgtggttccaatgccacctacagagagaactagtctatcagtccaccaccaatagtcattgctcctcactgccacatggtgtcgctgttgaagactgattctgcatagtctcatggctgcttgtccattgctgccagatgtccttgctgggttcctgcacaagtcacagtagtgccccctcttggtcttagcatttatcacaaatttaatcacatatttgttttcctgcttattgtctgactctcctataggacgtaagttccatgggtgcagttcctatatgtgctttattcagcactactgaatttgtaccagaataggtacttaataaatattgctgaaatcaatgagtgaatgaagaaatgcatgcatgcctgcatgaataaatgaaataaagtgtctgaagcaagggggagacaagacagagaaagtggtttccagagacagaatctcagcccacctcttgagagggagatggcatacttgttacataaatgcttctactccccactcctttgtccatggggccactaatcaatcacatcattctttctcgctgaggttggagacaatttctaaatcctcagtacagaagtccagccatctcttgtaatgaattggaggaggcagacaacaatggaacgttttgtggtaacaggatgcaagggaatgttctcactgtggcagttttaacatatagcccccaaattctttgacattcctcttatttaatggtgggatccctgacccttgcccttgaatctgggttctgcgaatgcttgaccaatagacaatggcagaaatgatgttctataagtttccaggaacaggtattaagaacctggcaacttcctctttctgtctctttaaacattcatcttgaaacccagctgccatgctgtgaggaagcccaagctgctttgggaagaggcccacctgagagaaaacagcagccagtgccagcttgctggccttgtgagtgagtcaccttggcaacggaccctccagccttagtagagacatccctggtgacattacatgaacaaagatgacctgtccccactgaaccctgcccagactgcaggctcatgacaaaataaatggtctctgtcttacgccgctaagtttagagtgttttgttaggcagcagtagtaactgggacactcatcaaacttcagcatcaactctgctaccatggctcagtccttacaatcaagttctgtctcagtttccccggctccacatgccaggtccccttctgggcctgcggctttgagaggaagcttacatcttatcccatccatggaatgggataggagcttattctgctccctatattgccagtcatgtagggggattgcatagcctgcagtcaccacccacttggtctctccagcagcccatgctgagagcctgaatatttcatgataggctgcagcttttgagcttaggaaggaactgcgggtgtcatttcgagctagttcccatccctttcattcccatgcctgtatttgtcaacgcttagcagaggacttgcccttgtgcgctgtttgggaagctgtgtgccatgtccgattcactgccccgtcactgcctgttactccttgtggatgcagatgccctagactcagggggaccatcttcagagcctctgctaagtggttctcaaacatgtttagatgccatttagccacttggatgacccagtgactgcctcattaatctgacaaatgttggaaacaacttgcttccttctctctttctgacattaggcaccagcagcttcctcacctctggcacactttgaattttagtaggccagtggagcctgcctttggaggtagacagaggtgaattcaacttccagatttatgatgtgaatctctcaagttctcgtgatcttgggagggggatatcatttccttggtcctggggttccacgtttgttcaatggggataatgccagcctcagaaagctgctatgaggagtcagtgagacaaggtgcacaactcatagtttggtggggcctgttagccccttgagatcagcacaacatgagttcaaatctcccacttgccattctaagcaagttagtgcttgttagggctcagaatagtgcctgttaggaagcactagagaagccaggcatggtgacttatgcctgtcataccagcactttgggaggtttaggcaggaggatcacttgagcctaggaggtcgaagctgcagtgaactatgattgtgccactgcactccagcctgggagacagagcaagaccctgtcttaaaaaaaaaaaagaaaaagaaaaaaaagacaagaaagaaagcactagagaaaggactgagccatggtaggagagttgaggctgaagtttggtgagtattaattttatggatcacttttgtgtgtcttcaactccaggcttctggaatgtctacctttgataataattatttttcttttttagagatggagtctcactatgttgcccagtctggtcttgaactcctggactcaagtgattctcctgcctcagcctcccaaagtgctggtatgacaggtgtgagccaccacatttggcctgaatgtctatcttgagaggtggtgagggttagtggtaaaaagtgtggattctagacccagacttcccaggtttaaacctcagctccaatacttactatttatgtgatcttgggcaagtgaacctgtctgggctgaagtttcctcatctgtaaagtggaaatgatagtaatacctacttttttttttttttgagacagggtccagttctgtcacccaggctgtaatgcagcgacacaacgaccatggcttactgcagctttgacttctcatgctcaagtgatcctcccacctcagcctcccaagtagcttggactacaggtgtgcaccaccactcctggataattttctttcttcttcttcttctttttttttttttgttttttggacatacaggatcttgctatgttgctgtggctggtcttgaactcctgggctcaagcaatcctccctcttcagcctcccaaaatgctgagattacagacatgagctaccatgcctgggtagtaacacttacttcttaaggctgagatatagattaaataagtcactgtatgtgaagcacccagcacagacatagcactatataaaagttagctattgttatcctgcataatgttgatccagatgtgaaattccatcccttccttaattcccacaaactctaattcaaaaacattttttttgtgagtatattagagcttacagaaacctttgggttcgtgcaaagggtaaaggagggatttactgcttgtttcacacactgcttcaagtagaaatgtagacatgatcattcataaactccagccatgcctctgtctgtggcagcccctcaccatgtcaccccatgtggtccccatcctctcaccttctcaatggttccttgcttctccttccttacacctccatctcttctcctcaaccctccaccctggatcatccttatcatcccatccaaattcttctctcttgagtatgccaagcaattctgctctccccaacccttactttctgcacaaccacatgcaacacccacccccatctcccatgtgctcagcagaacacaaagactgatatggtttggctttgttttcccacccaaatctcatgttgatttatgatcttcagtgttggaggtggggccttgtgggaggtgattggatcatgggggatgactgctgttcttgggatagtgagtgagttctcatgagatctggttgtttgaatgtgtgtggcactgctgggcgtggtggctcatgtctgtaatcccagcactttgggaggccgaggcaggtggatcacaaggtcaagagatcgagaccagcctggccaacatggtgaaaccctgtctctactaaaaatacaaaaattagttgggtgtggtggcgcacgcctgtagtcccagctacttaggaggctgaggcaggagaaatgcttgaacctgggaggtggagcttgcagtgagccgagattacaccactgcactccagcctggtgacagagcgagattccgtctcaaaaaaaaaaaaagaaaagaaaagaaaaagaaagaagaaaggtgtggcatttccccctttgctctctctctctcctgccaccatgtgaagaaggtgcttgattcccctttgcccttctgccatgattgtaagttcctgaggcctccccagccatgcttccggtacagcctgcagaactgtgtcaattaaaccacttttcctcataaatgacccagtctcaggtatgtctttatagcagtgtgagaatggactaatacaaagaaagaccttccatttaaactgtccctaccctccttggaaggcagtttgagttataaaaagaaatgaggctgggcactgtggctcatgcctacaatcccagcactttgggaggctgaggtgggattgcttgagtctagaagttcaagactagcctgggcaacacagtgagaccctgcttctacaaaaaattaaaaaattagcagggtacagtgtagcatacctgtagccccagctacgtgggaggctgaggcaggaagattgcttgagccaaggaggtcaaggctgcagtgagctaagatcacaccactgcactccagcctgggtgacagagcaagaccctgtctcaaaaaatacatgtatatatacctcttgttataggtgtgtaaagactataataaatagagtataaattacacaggttcaactattagctaaaatatacatgtattatattacatttacccctttaccttctaacccccttcctcactagacctcagctctcactgctctagggaaagggagccacagcaggatggggagggaaaccaaggaagttaatttccaaatatccaggtcctggtgattgaaaggcagttcacacagaatcttaggataattttgacaatcagtaattttcgctttacggtgttgaagttaggacataactcccacatgagatgggcatctacagctcaaaaagtgttgatggtcttcttagaaaaaagaaaattgcgcttctaatagagcaagagagtaaaagtgaacatgaaatctttgcacagttatttgaaagagaaaattctgattttggcaatgagatctaccacacttatgtgggtacttgtttcagctacaaacgtagggaaatgttcaataaaagtcttgaaatagagcttggggtctcactctgttacccaggctagagtgcagtggcacaatcatagctcactgcagcctccaactcctgggctaaagggatcctcctgcctcagcttcctaagtacctgggactacaggcacatgccaccaaacccgcctaatgttttttaatttttttgtagagatggagtcttgccatgttgcccaggctagtctcaaactcctgggctcaagtgatcctcccgccttggcctcccgaagtgctgggatgataggtgtgagatgccatgctgggcctaaaacatatatttctaatgcagagctgagttgagaaggaggaaagggaaatctccaagggcctgaaaataggagtgatcttcaatcaagaacagtaaactctcagttgctgttgtggcagcccccagggcacatccttggacttcagggacaaaggaaaagggttttaaaacccacgcaggtcaggagatgtggccccgtgaaacagtgattgggaacgaagacccattcaaatcaaagctggagcctggaaggactctttcccatgaaatggggaccagaagttctccagcccaagccccggcctaacaggctgaggacagagcaggtgacaaggacaggaatccagatacacgggcagagcacaagaccatttatcacaatgtgggcacaagattggggcaaatgtgatgctgagtctcaaagcacaagattgaataataagaacgagaataatgatggccatttattgtgcacttacactgtgtgtcacacgctaagtatgtcacactgaattcttctgatgaagtagatgctactactgacattgtcactgtgaagctgatcttgtagatttggacaatgtcaggatgggaaagtggttgtctactcctcccaccttgtggggagctttagtgaaacaattaagaggatactttttcaccctggtggcttttaaattatgcctcgtggaaggtcaggggctgccttaggtagcaaagggaaggtcctctatttgtggcatcgttccaccccctcttcaactgaagcagtttcatttatatctgttttattatttatttatttatttattctttttttttttttttttttttgagatggagtctcactctatcacccagactagagtgcagtggtgtgatctcggctcactgcaacttccacctcctgggttcaagcgattctcctgcctcagcctcccaagtagctgggattacaggcacacaccaccatgcccggctaatttttacatttttagtagagacggggggctcatcatgttggccaggctggtctcgaactcctgacctcaagtgatctgcctacctcggcttcccaaaatgctggaattacaggtgtgagtcaccgtgcccggcctctatctgttgtatatactgtgcttctctctcatgagatctgcttcactaagagggttttgtagataataatcatcatcatcataaataaaatacaataaagtaaaataaaataagtctccaaaaagagtgacaatcagacgtggtgtctattgctgtgccacagcctgtccctgtctcttccagcacctcacgatgctacattgtcagctcttgtttggcggccactggacacagactgagcagggactttgttctccaggatttctccagcatctggcccagaagagatcccccacaactgtggaagaggaaattacattggatttccacatgcctcaggccgacctgggagtctagagggtgtagacttggaacaggggtctgtccatgggacatgggctgccctccaacccctgggcaccccacacatagctaagaagaatatgggtctgtttcctgcttattatattcacctaaaaggtaaaataggctctgcttctggaagctccttaattgcagctttataaagaggtcccacatgtgaaaaagaggggaaattaattggtcttccagggagcagctgaatgaggtctggtaattgaatttcacaatggatgcctccctctcggtggcccgcatgtgatctgggatggatatttgaagttttcgtcatgtaaatggcttgggctcctcaaggtttatattttttggtgggcattactcattcacacttctatcttggacaagatggagaagaatttatgccatcttacaaactctaaaatgatagcagggaaagaagaagggggcaagggcctgtcctcatcttgagatgcaatttggtagatcctttgcaaaggctggggaagggccaattcagagaataaatcattactcaaatgccggctaccccagaatgaaggtgcagacccagctggtaggtactagtgcttgggagcttggctccaaaatgagttatgataggtgagatccggaggggcaagaaacacaccaagtcatgatgataattaataccttgaacaggtagctatatactgagatgcccccctgaagatttaactagcaccatgacccaaatggttacttaagtctctaatggttaaagacttaacttgtgtgttttctgtctcaataaaatagttactagtaaatcactgtccttgggctggatgtgcaaggtaacctccaaccactgccactaccaggataggcatcagaccttttaggtttttaaaatccaaatcagcactggaaatataaaatatatttctagaaatacatcaaatggatagaaatataatatgagccacaaatgcaagtcacatatgtaattttaaattttccagtagccatattttaaaagtaccaaaaagatgatattaacttcacaataggctgggcacagtggctcacgcctgtaatcctagcactttgggaggccaaggtgggtggatctcttgagcccaggagttcaagaccagcttgggcaacacagtgaggccccatctctacaacacacacacacacacacacacacacacacacacacacacacacacaaattagctgtgtatggtggtgaatgcctgtagtcccagctactctggaggctgaggtgggaagacacctgagcccaaggggttgaggctgcagtgagacctgacagagccactgcattccagcctgagtgacagagtgaggccccatctcacaacaaaaacaaaaacttaataatatattttatttaacccaatatatcaaaaatatctcaacatgttgtcagtataaacattattaatgagacataaacaaatgtaaaatgtgatgcatgtaatgtaaaagaatttacattatttgaaaattttttgttgatattatttacatgatttcttattatttgagggctgtaagagaaggatctgtttcaggcctctggaatacactaattcttgtactaaatacattatttcttatactaagtctttgaaatccagtgtgcatttttttaagagatcagatctcactctgttgcccaggctggaatgcagtggagcaatcatagctcactgcaacctcgaactccttggctcgagtgatcctcgcgcctcagccttctgagcagcccagtgtgtattttaacttacaacacatctccattcacatgagccacatttcaaatgctcaatagccacgtgtggctagtgttacaaattggagtacgcaggtggagtccttcctacagacagtgaagccaaagaaatagaataaaccctttgtgattcaagggccacaaaggaaactgaagagagttctaggttaagaaagccaactgaagcaggttgcggtggctcatgtctgtaatcccagcactttgggaggctgaggcgggtggatcacctgaggtcaggagttcgagactagcctggccaacatggcgaaacctgtctctactaaagatacaaaaattagccaggtgtggtggtgcacacctgtagtcccagctactcaggaggctgaggcactagaatcacttgaacccaggaggcggaggttgcagtgagtggagatagagccactgcactccagcctggatgacagagtgagaccctatctcaaaaaaaagacataatctaccacagtagtgccaagataactcaataaaggaaggaattttagtttaaacaaatggcactgagacaattgaatatccacatgtaacatgaagttggattcctatttgcaccctaaaaattaactcaaaaagaatcaaattcttaaatgtaagagctaaaactataaaactcttcaaaggaaaagacgtgaaaatcagccaggcatggtggctcacgcctgtaatcccagtactttgggaggccgaggagggtggatcatgaggtcaggagttcgaaaccagcctggccaacacggtgaaaccccgtctctactaaaaatacaaaaattagcctggtgtggtgatgcgcacctgtaatcccagctactagggaggctgaggcaggagaatcacttgaactttggaggcagaggttgcagtgagccaagatcacaccattgcactccagcctaggcaacagagtgagactcagtctcacaaaaaaaaaaaaaaaaaaaaaaaaaaaaaaaaggcgtgaaaatctttgtgactttggattaagcaatggtttcttagatatgacatcaaaagcacaaacaaaccaaaaaacagataaactggactttaccaaaatttaaaacctttgtgctacaatagggaaaagacgacccacaggatgggagaaaatatttccaaatcatacacctttttttttttttttttttaagagacagtgtctcactctgtaacccaggttgcagtgcagtggaatgatcatagctcattgcagccttgaacttctaagctcaagagatcctcccacctcagcctcccaagtagctgggactacaggcttccaccaccatgcctggctaattttttaatatatttttttggtagaggttgggggggcgggtctcactatgttgcccaggctggtctcgaactcctggcctcaagtgatcctcctgcctcagtctcccagagtgctgggattatgggcatgagccaccaccgtgcctggcctccaaatcatgtatctggtaagagtctagtacctagaatatataaagatctcttacaactcaacagtaaaaagacaaataacccaatttttaaataggcaaaggatttgaatagacatttctctaaagaagatataaaaattgccaagaaggcctggtgtggtggttcacacctactaatcccagctctttgggaggccaaggcaggcaaatcacctgagatcaggagttcaagaccagcctgaccaacatggcgaaacccccttctctactaaaaatacaaaaattatctggacttggtggcacacgcctttagtcccagctactcggcaggctgaggcaagagaatcgcttgaacttgggaggtagaggttgcagtgagtgagatggcaccactgcactccagtctgggtgacagagcaagactccgtctcaaaaaaaaaaaaaagaaaagaaaagaaaagaaaaaaatagccaagaagtacatgaaaagattctcaatatcattagtcattagggaaatgcaaattaaaacaaaacagaaaaaaatcaactaacaacaatagtgaggaggatgtggagaaactggaacccacatacattgctgatgggaaggtaaaatggtatagccactttagaaaacagtgtggtaattcctcgaaaggttaaacatgttcatagtaaaactcatacaccaatgtttatggcaacatgattcataatagccaaaagtgaaaacaatccaaatgtccaccaactgatgaatgcataaacaaaaccttgtatatgccaggcacggtggctcacacctgtaatcccagcactttgggaggctgagacagatggattacttgagtccaggagttggagaccagcctgggcaacacagggggacatcctccccttaccctgtctctacaaaaaatacaaaaattacctgggtatgttggcctgtgcctatactcccagctacctgggaagctgaggtggaaggaacacttgagcccagtaggcagaggttgcagtgagccaagattgccccaccgcactccagcctgggtggcagagtgaaaccttgtcttaaaaaaaaaatagttctgccgggtgcggtggctcacgcctgtaatcccagcactttgagaggtggaggtgggcggatcacaaggtcaggagattgagaccatcctggctaacacggtgaaaccccatctctactaaaaatacaaaaaaattagccaggcgtggtggcatgcgcctgtagtcccagctactcgggaggctgaggcaggagaatggtgtgaacccggaaggcggagcttgcagtgagccgagatcgcgccactgcactccagcctgggcgacagagcaagactccgtctcaaaaaaaaaaaaaaaaaaaaaaatagttctgagaggccaggcgtggtggcctgtaatcccagcactttgggaggccgaggcagggggggtcacttgaggtcagaagttccagaccatcctggccaacatggtgaaaccccgtctctactaaaaatacaaaaattagctgggcgtgatggtgcacgcctgtaatcccagctaccagggaggctgatacacgagaatcacttgaatctgggaagcagagattgcagtgagctgagatcgtgccactgcactccagcctgggtgacagagcaataatccatatcaaaaataaataaacgaataaaagtgatggttatacaatcttatgaatatactaaagccacttacttgtacaatctaaagtggtgaattttatggtgtgtagattatatcaataaaaatgcatgcctgcaaaaaatccatgagacttcattagaaaacagaaaaattgataaaatttaacaatgtaaaaataataatataaataacaaaaattgggacgtaaaaagagaggaggtgagagtactagtgccatcattttcaaaatggggagatagacaaaactgaaacatgtagtttaaaataaaaacatagtgaccacaactttaatctatttgtaatctctcctttataaatttagagagatatttcaaaaagttatctcttgaagtacagaaacattgtttgactttcaacaattcctttagtttctctccagttcttttttgtctagtaaattataataaaatgtaatgcttcttaattaaaatttgaaactataatataatctccttttaataaaatatttctatctcatcctcctcattttatattggcacaaagagatatttcaaataatgtacatctcttataatttctagaccacaaatgtgattttttttctactatcaccttcaccctttcctttattatttgaattcttcataataatgttgtatcagctccctgaaacaatagagttcaggttctaaatgactggaagaaaacatgccaagacaggccttggtgaaatatagattatttttttcttcacattattctgtatttttaaaattgctacgcccagtctccccagaggaaactgacccaacctttaggctggaaacagggaaaaaataattgtggttttcataagggaaagatgtctaaatagctttggcacaaaacttcctgggcatctgtgctccagaagagaatggttgatagggtacaagagctgtgccttgcacctagtgttaaacatggccccagagcagtgacggaactctgtcaaaggaccacaatggcccatgctgggacctggaaatagtgaaacattgctgcagcctggaccagcagtactcaaggaggtaggagggtcaccatgtgacagcagcttctactggatgggaagtgacacagcaacaatagcactcctggactctccaacgttgctcccatggcttttggatttaatttaaagaaacaaaagagggccgggtgcggtggctcatgcctgcgatcctagcactttgggaggttgaggtgggcagatggcctgagctcgggattttgagaccatcctgggcaacatggtgaaatcctgtctttactaaaaatacaaaaaatagctgggcgtggtggtgcacacctgtagtcccagctaccctgggagactgaggcacgagaatcgcttgaaccccaggaggcagaggttgcactgagctgagattgcgccactgcactccggcctgggctggagacagagtgagcctctgtctccaaataataataataataataataataataataataataataataataaataaaataaaatatcgctgggctcggtggctcacgcctgtaatcctagcactttgggaggccaaggtgggtggatcacctgaggtcaagagtttgagaccagcttggccaacagggtaaaacctcatctctactaaaaaaaaaaaaaaaaagcctggccttggtggcatgggcctgtaatcccagctacttggaaggctgaggcaggagaattgcttgaacccgaaaggcagaggttgcagtgagctgagatcacgccactgtgctccagtctgggtaacagagtgagactccacctcaaaaaataaataaataaataaataaataaaataatctatagcagttgttatctacagttgaggaatagtttacaactgttccatatacaaacttataggttgcaagtcccctgtaatgtccattattttattgaatcctttttaaacagtcctataggggaaggcaaggattagaatcagtattttatgggtgagaaaactgaggttcaacagagttcagtgacttgttcaagatgacacagctaggccaggtgtggtggctcacgcctgtaacctcagcactttgggaggccaaggctggtggaacacttgaggtcaggagttcaagaccattcaagaccagcctggacaacatggtgaaaccccatctctactaaaaatacaaaaaactagccgggtatggtggctcaggcctgtagtcccagctacttgagaggctgaggcatgagaatcacttgaacccgggaggcagatgttgcagtgagccgagatcgtgccgctgcactccagcctgtgccacagagtgagactgcatttcaagaaaagagatcacacagctagtttgagactcaaagccagctttgtctatggctagatggtgcctagcacaggaatctaaaggaagcatggttacatttagagtttttggagagaacatgtagccagagggacagtaggtgagtgtgaattaggcacccaaagcgagctcgggtcccgagttgagacccgggagcatcagtgagccctcttagtgtgggtcttttcttcattcttatcggcagctcctctgctcagatctgcttctttcatcaactaatactcacaactctctcatttccagacactttcctttaattgtgtgtgggatcatacacagtatcagggaaaactatcgatagcaagcctgattatagacactgtgaaattagcaaagagagaagaggttttgttttgttttgtttaccatttgtttaacatatgagatctgcttacccgtggtgtcaatgcctgtaacaattatacatgtaacccagatgttccccagggtctctcaccacaggcaagctcagtaagatggacttagattccatttccatggcctatatgtccacagagcccttcccaagagtctggagaccttaggggactcatatgctcagtaacattgcctctggggtcctggttctggcatgaatctctatgacccagatgtgaaactcagccacactctcagacaaataaccaaaaacattcatgggtataattagattttttctcagttggtaaaaatcttaaatacagaaaaaacagagagctgtctaacaaatacccatgccctccaactctttgaatttaatgttattattttacaggatcggcttttgattgttttaatctaatagggttaaaagtgacatctcttacgtatgccttccttcccagaggaatccaccatagggaatttggtgtctgtccttccaaatcttgtttttatacttttactcatataatgtatccataaatgtttgtcttatgtgtttttataatgctatcatatttcattttctgcaagttgcttttttatgcaatagtgtgtgttttttctttgtttatttgtttttgagacagagtctcgctctattgcctcagccccccaagtagctgagattacaggtgtgtgccaccatgccctgctaattttttgtatttttagtagaaacaaggtttcaccatgttgcccaggctggtcttgagctcctgagctcaggcaatctgcccgcttcagcctcccaaagtgctgggattacaggtgtgagccaccgcgcccggcctggttcctgttttcgtaaggagattggaatgagatgcaaataaacagagaagtgattatatctaagaaatacaaacaagtctgtctgctgccctcactacatggacatagacccaccaggcaattccacctgctgcttcaactcatattattcccagtcatttaccttctggctggcaaccttctcctccttacctacttttaatgctcctacccccattctgttctctctgccttcttcgcaggggcaaaagataaattcctcccattttctcatggaaagctcttaatcatctcttctgttactaggggcctggtgctcctgcctccagtttgtggttcctcaaacacagttccttcttgtatcagttaaggattgcaacatagcaagcccaccccaaaacttaactgtcttaaaacagtactacttattagctcttgaatctctgggtcagcagtttcgcctggactcagctaggtattatttctggtcttggctaggttcattcaggcactgtcgttagccaggtggctctgcttcagggattggttgactgtcagctggggcaacagcagtgacttgaccactcgtctctcctgctcctgcaggatagccagggcctgttctcacagtagcagcaggactccaagagtgacagaagaagcatgcaaggcttctggaggttcaggctcagaactggcacaatgtcacctctgcctcattctattgaccaaagcaagtcacaggccagcttagattcaagatgtcaaaaaataaactccatctcttgattggagaagctgcaaagtcacattctaaggggcccggaaacaaggaggaggggaggactgtgggttggattctctgggaagccaactctgagatagagattaacatgcaggaagttactcagggagtgctcttgggatcaacaccggtggaagagcagagaaggaagcaggatggagcagagggagaaattgaagtgcaatgtcagaacaaaggcttccactgacctcatggagacctctaaaactggaataggtcttccaagttgtcctgagtagaggcaaggggaccaggcctctaagctcccaagctgatcaatcatttatgcagactgccctgaaaaggcagctgccaaggaaattcccaaagagggcttagagccaaggatcatctgccaacacttttcccagtagcaggtggaataaatccttcattcctcagtgggggaggagggttgcctgtgccgaacatcacagtccactccactgccacctctccctaagaatgctaatgctcatgataaaacgcttgtcacttgctgtatatgtatacgttaaatatttataatcacttattaaatgcatcgcctaacttgtacagattttagatgatcacaatgctaaatgtcactcctttgaacttagtcttcatagtttcattgctcatttatctaggtcatccactcaaaactttaaggatgaggagaaacagcttctcccatcagaaatctaggcaagaggcgctcactggctcccaaccagcgggagggtcgtcgtgtgcctgcgcctgggttgggggagccttcgcgcctaggcctttccctcaatttttcctctttccccctcgccccgcactggggcttcctggtcggcgcttgcacagggaactcagtgctgagattgtctcaagccccaggaaaaatggtggaaaattcactgtcaccattgccagaaagaccgatttatggccttctgcttctcttaagctcccaatttggcttcatactttacctcgtgtaggcttctattcctgaatcttggctaaactccttaggtttaacctattggcctcaaaaatattggacagttgcattacctctctacttccttattactatagtaattggctatgtgctcttgtttgtaccccattcactcgactccattcgtacaatcacagataactatgctaaaaatcaacagcagaagaaatactaagaggaggccattccagcattaagagctatttctatttagtgaagtaaaccaaattttctttcttgtagccaaagacctttacaccaaaaactgaaatgtacctggccatactaatgagaggtgaagctggctgggcttctgggtcgggtggggacttggagaacttttctgcactgacggggagtgtctgcagcttcattcctgaagtcagcgagaccaccagccgaccggaaagaagaaacaactcccgatgtgccacctttatgaactataacactcactgtgaaggtctgcggcttcactcctaaagtcagcgagatcacaaacccacgggaaggaagaaactctggacacatctgaacatctgaaggaacaaactccagacataccgtctttaagaactgtaaccctcaccgcgaaggtccgcggcttcattcttaaagtcagcgagaccaagaacccgctggagggaataaattccggacacactaacaccaagcatttatttatttataagtttttgccatcgtaattttgaccataaattaattcaaccatctctcttattaatagaggagatgtaaaaattgtaaattgatcttctcttagattatgttcaatgaatattgtaagtgttctcatgtattgttaatgaacagaataaaatacagcattaccattaaaaaaaaaataagtctaggcaagaaccatttcaagccatgctggcaacagagtcaccagactgcagttaaggtagagacacgatgttctttgtagttctttgtagagagaaggactaagatctgggtcatggagagatgatcactcaacagggaatgcgggaagctagagtaaaatttggctggcagaccaagtcgtgagaggaaaaagagaccaaatgaggctttgaaagataaataaacaggccgggcgtggtggctcacacctgtaatcccagcgttttgggaggccgaggtgggcagatcgcctgaggtcaggagttcgagaccagcttggccaacagggtgaaaccccgcctctactaaaaatacaaaaaaattagccaggtgtggtggcaggcgcctgtaatcccagctactcaggaggctgaggcaggagaatcacttgaacctgggagtcggaggttgcaatgagccgagatcgcaccattgcactccagcctgagcaatgagtgagactctgtctcgaaagagagagagagagaaagaaagaaacaacccaccccacgagggcagctcttgatatctgggaagacagttcatgccttacagaggcaagttgcttgtttggcaaaattccaggagagccgtcaaatcagaatttggggacctggatggagaattgatttcacctgcaacaaaggcgactccctgtgaccacatagaaaagactctgctttttggaaaccaaaggctgtgaccttcacatgcaggcttatagataggaacaaattaacaggtcaggccaaaaaggaggagatgtcagcagtggccagttggaaagttctgggagaaccacaaaatgccagagtctctcaattaaagtggaaaaaccggcttagagtgattcaatggtaagatcaggatcatgccatgggttgttagctattctgtttagctctccagatctacccttcgccctctccaccagtggtgctgtgtcccagagattcactttaatggaatatgtcgaaaggattctttactccctggctttctattgggtttgctcaatgggagacacgtgcaggatactagaggatggaagaagagagaaatgagggtatttatttacccagctcccccgccactggggccaaggactggaactatcatggaaaaccgttttctcaacttcaactctttccacattcacggaagcactccttctccctgcctctttaggcctggacccataatgtacccccctcaactgttgcagtctctggggtgcttcccccattcccgttggcttcccttaacgattgttacaactttataaatactttcctggccaggtggggtggctcacacctgtaatcccagaactttgggagggtgaagcaggaggatcgcttgagtctgggaggtcaaggctgcagtgagctgtgatcacaccactgcactccagcctggaaaacagactgagaccttgtctcaaaaaaataaataaatattttccttgatcactgcacttgagtgctatctcttttttgatgcaattctaaatgctaatcacttgagctagcttattgaaaaggggacactgtgaatttttatggatagttgttccttttggctgtccagcctcagaaacacatactcatgtctgaagaatttcccatcatatgagtcttggtgggaagtagagctcacttccccacatagaatgtggcagtgctagctatttgcttttcagcctcccttgcagctaaggtttgggcaagtgacctaggctcagccagtcagaagcataaaccaaactttgaatgaggagtcggtaatataaagacataaggacagtgctgggcatagtggctcatgcctgtaatcctagcactttgggaggctgaggcaggtggatttcttgaggccaggagtttgagaccagcctggccaacatagtgaaaccccatctctactaaaaaatttaaaaaaactagctaggtgtggtggtgcgcacctatagtcccagctacttgggaggctgaggcaggagaatcacctgaacctgggagatggaggttgcagtgagccaagatcatgctactgcactccagcctgggcaacagagtgagactctatttttttattttttattttttaaattttatttatttatttatttatttttgagatggagtgttgctctgtcacccaggctggagtgtagtggcacaatcttggctcactgcaacctctgcctcctgggttcaagcgattctcctgcctcagcctcctgagtagctgggattataggtgcacaccaccatggctgggtactttttgtatttttagtagaggcgaggtttctccatgttggccaggctggtcttgaactcctgacttcaagtgatccggccacctcagcctcccgaagtgctgggattacaggcgtgagccactgtgcccggccgagactctgtctctaaacaaaagaaaacacaacacaatacaacaacaacaacaacaacccaacccaaaccaaaccaataaaacaaaaacttccacttaaatcttaaaaaaaaaaaaaaagaaagacacagggacagtggagaggtagtctggtggtggtggccatagaagcagcaatatcctgtctctggggcagcctgggcagtagggccagtgactgttcctagcatgcagatgtggagctttagcagagtcagagaggcaagtggaagggtctggtactctgcactggaggcagcagggtcctcacaggccctgtgtttctgccattgcggtgtccaggtctggttcttcagccttcccagcaatgccaaaagctctctggtatcttttctactgattcctctcctgcttaaatctaccacagtcagtttctgttgcttgcattatgaatcccaacttgtggtttgcgtgcaacccaaatgtgggctacagctaggcttcacagggaaatagaaaacaggggcccaggcagctactccctctgcctcccactttggtgcctcaatttctctctctctatctgtctctttctctgtctctctcaatacaactgccacatacttctttccagctgtggttttgtcttaattcatggaaagacattatagcttactgtttaggaagcacccactttgaggtcagaatgcctggattcaaatctcagatgtacagtttaccatccacaaggttttggtcaagttactgatcctctttgggctctgtttcctcatctgtacaatgaggacaacagttttcctgttttgaggatgaaatcacacaacgtgtgtaaagccctcaccaagctattaggccacaggagccatcagtaattgttgctattgttatcttcattatcagcattattatcagcacggtttggggacttatagagactacttaaagcaggcatcttaaacttcaaatgcctacaggagccaacagggatgatgaaaaggagccatgtatagaacacaggcacacacattttccatagtcccaagggaagctctcccaagggactgtaaaaattgtgcgagtgtgtgcctgtctagagggggcagccatttcccagccacagccatttattgccatgtggaatgtgagcccggtgatgccagattttccactatttcaagagaggtcagatatccagctatttggggtaagcttgatgtttttcaaaaatctaaaaaagcactatcctggccaaaggaaaccttcctggggccacagcaggctgcaaacgctaatttctatgttctaatgcaaatttctggattgagttgaaattgtcagggagggaaagtggttaggccaggttaatttcattggctcaatcaggtatggccatggcccaccactcacccagtggggaatgtggtggacactctgactgtggggtgtgggcaggaatgtagtcataggcatactttagagaaggaggcaaggaccaaaggggtgccccaagagttgctttcctatggatgccagcacattaaaaacaaacgcatcaggaatgcaataagtcccgataagtgcaaggttaagagtgaggcttgtttatcttgttatttatttaaataacagtgtgtctggcggtagggcataacaggactagcacaaaggctcagatatatccatgtgattccagattatttccaccctttcacacctccatcctagcatgtaggcctttgtcctcatacttttcacctcatggttgcaagatggctgcaattgtgaccatcacaactatgttccaggcagagggagaggaaatgagaaggagtaactaatggcccttatgtcaggactttgcagaaatccccagcatatatatattttttcatcttattggccacagctagttcccatacccatacctagtgacaaaagaaattatggaggtgagtatttttagcttggtacattgcagccccaaagaacatcaaggtttttaaaaaccctattttggaaacaaggagagaataacctggagtaggaaatcagcagcctctgccaccttctctgaatatgcaccatgtgccagaccccagctaagtactgggatatcaggctaacagtcccagtctgcacagcagaaagatacagaagtgggcctggtgcagtggctcacgcctgtaatcccagcactttgggaggccaaagcaggcagatcacctgaggccaagagtttgagaccagcctgtccaacatggcgaaaccctgtctttactaaaaatacaaaaaattagccaggcatggtggtatgcatctgtagtcccagctacttgggaggctgaggcaggcgaatcacttgaacccaggaggcagaggctatggtgagccgagatcgcaccattgcactccagcctgggcaacatgagcagaactctgtctcaaaaaaaaaaaaaaaaaaaaaaaagagagatacagaagttgttgtggaacccaacacagctgggccgggttccaaagtgagaaaatcagcgctttggctccttacagatcttctaggcctcccatccttcctgccccttccctgcccctcctgctgtcagcgcagtcccacaaagggcagagtagggtggaaacaatgtgtgattaacaccagtagcagtttcaggaggcatccaagagatgttccagagagaaatatgtaactggcacatctggtttataatgtgtattaattcctgacatgtagtttgagtaatatatgtaaagcaaaaagtccaagtgttgatttaggggccttattattactctgtcagcagaattcatgttctatttgtgcagtgctctgggcccagcacctcacctagggcagcaggaaggggaaggctttctcatgggtgccagtggatggtggaggcccctgctgatggtgatagggatgtggatgagtacttggagcccctggtagggttggcagaagctcatctggcaaagaagatcgtggagctagaccaagtgccagctgaggctagaagcagaggcatcctacccctcagaggcagaagtagcttaaagtctagaaaactgtgggctgtggagttcaaagccagctctgccacttcattgccatgtgactttgagtaagttattccagctctctgagcctcaatttctgctcccataaatgagaaccataataacgcctacctaacagggctgctgtgaggtttaaataaaaacaacaggtgctgagaatttactatgggtcagcgtagtgttgcaagtgtttgacatgtattatctcattgaatcctcacagtaatctcatgtagatactattatgatgcccaatttacagttgaagaaatgcggcacagagaggtgaagtaacttgctcagggtcacacagctagtgactggcagagctggggttcatacctagacaatctagccccagagaacactcactgagatgtttcaacagacagctatattttatagtaagcacacagtaaagggtaattctctaggtcagtgatgtccaatggacctttctgtgatgaaaatgttttgtaattctgtgctgtccaatacacgagccactagccacagatgactatttaacatttgaaatatggctagcttgactaaggatgtgaatttttaatttaatttaatgttaattaacttaaatttaaatagccaggctgggcacagaggcttacgcctgtaatcccagcactttgggatgccaaggcaggtggatcacttgagtccaggagttcgagagcagcctgggcaatatggtaaaaccctgtctctactgaaaatacaaaaattagctgggcatgttggcacacgcctgtaatcccagctacttgagaggctgaggcacgagaatcacttgagcctgcgaggcggaggttgcagtgagctgagatggtgccactgcattccagcctgggtgatggagtgagaccctgtctcaaaaaaaaaaaaaaaagaagaagaagaagaaataattttgaatattgaaccagccttgcatacctgaacaaaatctcacttagtcatggtgtataattctttttatctatcgctggatttgattagctaatattttgttgaggacttttacatccaagttcatgagagctgttggtttgtagtgtgccttcttctttccacccttgagaatcttcctaggtttgctgtgttgtgtccagggatttttagtttttagggagaggacctgggagaaatggagctattccatgttggtggaactggaaatcccacacattctttttttacatatatgtactattatacagatgtgctgcaatggattaaaccaatttcctggttaacacttagattctttctaattatttgtcgttgtgaacaatgccacaatgaataagtttatgcatttgtcatttcatacttaaaggtaaaggtgctattgtaaattctcagaaatggaattgttgggacaaagagcacatgtatttttaattttgatgtttccaaattatcttctataggtattgcaccaacttatattccttattctcctgagactgccatgccccctccactgactctctgccgacagataacatgttagggtcttgctaatctgatagtttaaaaaaagtgaaatttatctgagttttgagtcataattaggtaggccttttccatgccctcaaaataaaggaattttcctatgttttcttttagtgtctttacttttttttttttttttttttagacagagtcttgctctgttgccaaggctggaatgcagtggcgtgatctcggctcactgcaacctccagctcccgagttcaagcgattctcctgcctcagcctcccgagtagctggggctacaggcgcgtgccaccacgcctggctaatttttatatttttggtagagacggggtttcaccatgttgaccaggctggtctcgaactcctgacctcaggtgatccgtccgcctcggcctcccgaggtgcggggattacagatgtgagccactgtgcccggccaacatctttacttttttatttgaatctttgatccttgtagaaattatcctgagctgtatgtggtggcatgtacctgtagtttcagctactaaggaggctgagtcgagagaattgcttaaacccaggagttggaatctagccaggcagcatcaccagagtcctgtctatcttttaaaaattcccctatcttatcaccaggaattagagaccaaaaaagaaaaaaaattacctggtgaagagagagaggaatagatctaacttgttgctgttgttgctttctatcatatgggtacccagttttcccgtcaactctcttgaaacagtctatcttatctcctctggtgtaagatgcgactattatcatatacttaattcctgtgtgtattttggatgtattctaggctttctagtctatccggctagttgtctatctattcatacaacaacactatactgctttaattattatttataaagattgtatctttgatagcggtagtcctctctcattctttttcttttcttatttatttatttgttttattgtttcttttctttttttttttttttttttgagacagagtttcactcttgttgcccaggctggagtgcaatggcatgatcttggctcaccgcaacctccgaatcccgggttcaagcgattctcctgcctcagcctcccgagtagctgggattacaggcatgagccaccacgcccagctaattttgtatttttagtagagacggggttcctctatgttggtcaagctggtctcgaactcccgacctcaggtgacccgcccacctcggcctcccaaagtactgggattacaggcgtgagccactgcgcctggccttcttttttcacttttttgtagagatgagagtcttgctttcttgcccaggctgctcttgaactggcctcaagggatcctcctacttcagcctcccaatgtgctaagattacagctgtgagccaccacacccagccttcttatttacatttttaaagttaactgtaaaacatcctcaagcaggtccttcaggaggtattcctgaagaaggcattgttatcataggagttgacagctccatgtatgtattgccgccgaagaccttccagtggcatgagatgtgggtggacctggaatatgatgatattgatgatcctgatcctgtgtgggcctaggccaatgtgtgtgtttgtgtcctagtttttaatttaaaagtttaaaaaataaaaacaaaaaccttcagaatcaaaaaagcttatagaataagcatataaagaaggaaaatagttttgtggagctgtacaatttgtttgtgttttaagctatgtattacaaaacagtcaataggtttttaaaattttttaagtttataaagtaaaaaagttacagtgaactaaatttattttttaagaaaaaagatacttttcatacatttagtgcagccttagtgtccagtgtttatgaagtcgacagtagtgtacagtaatgtcctaggccttcacattcagtcaccactcacccactgatgcacttagagcaacttcagtcttgcaagctccattcatggtaaatgccctatagaggtgtacaattgtatcttttataccatatttttactgtaccttttctatgcttagatatgtttatttattatttatttatctgggagacagggtcttgctctgtcgcccaggctggagtgcagtggcgcaatctcggctcactgcaacctccgcttcctgggttcaagtgattctcttgcctcagccttccgagtagctgggattacaggtgcgtgccaccacacctgactaatttttgtatttttagtagagatggtgtttcgccatgttggccaggctggtcttgaactcctgactcaggcgatccacctgcctcaggctcctaaagtgctgggattacaggcgtgagacactgtgcccagccaacttagatatgtttaattacacacacacttcccattgtgttataattgcccatagtattcagtatggtaacatgctgtataggcttgtagcctagaagcaataggctataccatatatatgtctatggtatagcaatagggtgtgtagtgggttataccatctaggtttgcataagtgcactctatgatgttctttgcacaaggatgaaataacctaatgaagcatttctcaatatttatcctcacggttaagtgatgtatgactatttatatatatatatatatatatatatatgtgtgtgtgtgtgtgtgtgtatatatgtgtatatatatacacgtatatatatatatatatatatatatgtagagagagagagagggagggagggagagagagagagcacataaggactgtgtataattatatatattttttccttatgccatatatattaaaaaagaaatatatatatatatatattttattactgagtcatcttatccaagaacatgacacgttttcctattgttcaaatctttcatgtcctttggtaatattttaaacttttcttcatataaatctcgcacctttatttccaggtattttgtaaagaagtgtttaaatttcttcacaaattgaatctctgcctcttttttgttgctattgcaaatgggatatcttcttcctttgtgtcttctgattgactattgtttgcatacatgaaagcagttgatgtttattaattctttaccatgttattccgtggaattcatttattgttgtcagcagtctcgcaattgattctcttggtgttttcagttacataatcttttcccccaaatactgatagatttatttcctcttttccacatcaatgcctataagatgacctaataagaagagacctcagttccctaccctaatagtctatctggaaaaaagatgtctcaacaaattaaccataataaagatacaaagggcagagtcaagacaagaagcaaaggtatctggaatcccagtctaagttcatttgcagtgttctatgcagcctacgaggtgagggcctgcctgcctcacccttcattactgttgcttctcaaatagccagcttagagctgcttctcaaaacccaaccataatttttccagactgggctgaaccaatgaaacaaaatatctaactaacaggggaggggagaagaggaagggtggaaatcatgctggctttcttgggtttgcactatggcttctggctaaaatcttcacaccagagcttgcctaacctttccatggtctcaggaatgggagaatctaccagaaagacccagaacctttgtgcaacagatctatgtccaagatatatcactaaatagcacattcttgttacaaaacaatgtaccaaataggtttataataatacttttcaaaaaaagtatttttattttgaataaaaatactttattttaaataacattttattttaaaatatttaaatactttatttttatttcaaaataaaatacatttttttgaaaagtattgctatatgctggtacacacatagaaaaagagatctagaggaaaattagttaagatgatgtcaaaagcagttatgagccaggtgcagtggctcacacctgtaatcccagcattttgggaggccaaagtgggaggactgcttgagttcagtagtttgagactagcctgggcaatgtagaaagactttatctctacaaaaaaattaaaaaaaataactgggcatggtggtgtgtgcctgtaatctcagctacttgggaggctgatgagggagaattgcttgaatccaggcaggtgaggctgcagtaagccctgatcataccactgcactctagcctaggtgacagagcaagatcctgtctcaaaagagaaaaaaagaaagaaagcagttatgtctagagattgtggctgtgaaagatgtcttagtctgttttctgctactataacagaacaccacaggctaggtaatctataaagaacagaagtttatttggctcatcgttctggaggctgggaagtccaagaacattgcattagcatctggtgagggtcttcccatggtggaagggcagaaggtggaagctagtgcacaagacagagagaggatatcgggctaaactctttcttttatcaggagcccactcccatgaaaattaacccactccctcaagccctcatgacctagtcacctcttaaaggccccactacccaataccatcacattggtaaataaatttcaacatgagttttggaagggacattcaaaccatagcaaggaatatttattttccatgttatctgtgtctgtaacattagtgtttttaagtaacaaccaggtattgcttttgtcattaaaaaaagaaagatagctctgacacatactaaaatgtttatgaatgaaaaaatgtgatttctgagatttgcttcaaaataatgtgggaataaagaaatgagtgtaggtagagactagccataaattgataaacactgaagttggatgatgggcaaatgggaatttgatatattatttcctctgcttttgtatatacttgaaattttccataataaaaatattttaaaaggaagtaattttatagacacagatatgaagagagagccacactgtagtttttaaaagaaacagcattgtatgtatgatattgcatctgtgtgcaatgatacttgtgtctctctctatattggtatacatgtaaaaaaaaaagacttagttcaagtaataataacaagcaagtttactgaacacttgtgagggtatcaggcagcatcttaagtatagaaatctctattttcttttttttcaaaatgatatatttaaggctgagcgcagtgatgcgcacctgtaatcccagcactttgggaggccgaggagggcagatcacctgaggccaggagttcgagaccagcctggccaacatggtgaaaccccgtctctactaaaaatacaaaaattgtaatctcagctactcaggaggcggaggcaacaaaaagatatatttaaagccactacctgcaggtcttttggaaatttaagtttttgctagcccagtaaattttttgacattcttcccataaaagggtggtgtcatgtgccttccttttgaacctggatgggcttctgttttgaccaacagagtacaacagaaatcccacctacctaatgttcacaccctggctctaccacttgctaattgtgacctgtggcacaatatgacctttacggctctatacctccttttccacctctgtataatgaggataatcataaatacctcataggatcattgtgaagattagatgagttgtatgtgaaattcacagaacaatttctgggcaggtagtaattactaaataaatcttttcttcattaacaacaacaacaacaacaacaagaaagagtatagcagaaatgatgcagtgtgatttcagaggctgagtcgtaaaataccatgcagctgctgccttgttcactgaaatacttactcacaggttcctgagccactatgtaaggagtttaactaccctgtggctgtcatgctaggaggaagcccaagccacacggagaagctatgtgtaggtattgtgatctacagtccccactgtgcccaacctttgagtcatcccagcccaggcaccagacaggtgagcacagaagtcttcagatgattctagtcctcaaccctgggagtcttcctcaataaggccctaaacatcatggagcagaaataaattatccctatggtgccctgtgtgaattcctgatcctcataatctgtgaccagaatacagttgtttttgttttatatcactaagtcagatggtttgttatacacaatagataactggaacatacggactttcaattgtatgagataattacatttggttcttatggttgaaatcactgtaaagagcatttttgtccttactcgcagttaatcacagtcttacactgtagtcttgtttacttatatttttaagttaatctattcttttggtttaaatatgtctttaaggagaaaaaagagtatttttgtaacgcatagtagaaacaattgctatgaaaattttaaatcatgctttcccatatatcattttaaatcatcttgtggctcaccagggacatatcccaccttctaggaattactgcattaagctttcttctgatcacaaaggtttctcctaacttttacatttgagaatgtatgaggttcccttccccaggttgtcattgcatgttgccccaggacaccctctctctgaaggagttcgcagacagagttcccgtgcagtgcatgagacagttaacattcatgggaggtgacccacatcaggaactgtgaagggtctgagattttaccctacttacaaactcatcagctagattatttcctgaatgctggcagaagacatagactcctgggtcagagataagaaactgtattacttacagagaaagtagatgctgacttcaggcttaccctgattccccaaacctctgaagtcctgaggatgtgatgcaggtgggcctgctcacacagagttgtgtcacaggagaggaatactgagctaagagaaactattgcttttacagtgagcagtcacaaaccttccctttgaagacatgacttcatccctcaaggttgttttctgcaaacacaaccctgagaaatggcctgagtaaagggcaatcagggtcttgccttcctggtgcaccagcaagaacatgcagggatgctcagagctcatggatatcccgatcacaagctgcatggcctaggccagataggctagggagtgctgtgaggtcccagagctaaaactccaccactcccttcccaactcctgaaagcatagcataatgtcagcaaagcagaaggagggatgttaaggggttcaccttgactccactttaatcagtaataataaaaggcgaatgatttgctcacttcagctttacttttattagtacaataatccaaacgatgctgagcttcttcagtttgcacattcaagggaaatcacactaacagcttctgtcaattagttactgctctagcaatgccacataacaatcaacctcaaactctcagtggcatatgacagtaagcactgggattacaagtttcctgatcagctggtggctctgcttcactccataagtaggctgggtggctctgctgcacgtgactcccatcctcttcctggaaccagtgggctaaccagaacatatttaactcttggagatgatggaattgtaggagagtttgcctagctgtgcaggcatattccaagctcatttgttttatgtctggtgctattccattggccaaagcaagtctcagggccaagcccgaagtcaaggggtgaggaagtatactccatccatggaggtggaggggaaggaggaaacgttcctgacaacgatggaatctactttctatcaaaagcccatggtttctcttcctactatttttcactcgcatggggcctcacaccctttttgcaaagtcttcttcgtgttctcccttcaactccaaagtaccaaagtacaattaattctcaaataatgaatattcacatgatagttcctccctcacctctcagaatggggctatagaaaaatttacactcattttatttcaattaagcaatatttcttcccaaataataaagaagaaacaaaacattgactcggagtttatgcctcttagctcctacatctgcccgctacactaggatctgctcctggaggacttgacaaagaccccagcactttatgttcaagcttttacatgcgcacgagaacttctgtttgagagatatgtattgtgcaattcctcataaagaatgactatagtttttatggttatataaggttataaaaggtaattaatttaggaacgattccgaaagaagagcgtgaataagagaacaatagctaaaacatctattttctttgctgccttgtagagttgaaaagaacatacttaaggaatgagctttacaaagaggttaaacaatacagtacctgactaagaatgttgttatggtaatatcttttccttaaaggtattttttctttatccctggtgttgtgtgtgtgtgtgtgtgtgtgtgtaagagagagacagaaagagagagagaatatcaggggacatgtgtatccctaggagtccctggaaggtatttgttacatgcttaaagaccagctattggcagccatttttgtagccccccagtcttgtcccagctgtgaacatccactgcctgggaggccacctgaaatctcctcatcttttccattgctggggatatctgtattcatcaaagattttttgttggaagtgacagaaaccgaactgtaactactttgagcaagaaagggtaattcattgtttcacatacacaaaccatggacagcacccggtggagccaataccccagatgactggattcagacacccaaaggccaccaggctgttctctcttttctctgctgctctttgcctgttggagccattcttaccagtcacaggcagacttctccacggggaggggaagatggactctggccactccagaatcacagccttccagctttagcaactcttggagttcagagaacatctctccattagttttggtgtaaaaagttccaggagatatctctaattggcctagcttgaatgacacgctcatggcacggaccaatcactatggttccatttccacaacaaaggtgggacgcaccgacatggccaccagggacatcattgggaactatgaaaccactttaatttgtatgagctatggagattcttatgagaactatcaagttggtagcaagccctctctcttcatctgtgccttaggaggcccatcaatgggaggaaggggatctggaagttcctcccatacagcagggtttggtccctgtgggtcagtaagtggggcttataaaattaaaagccaggtgtggtggctcacgcctgtaatttcagcactttgggaggccgaggcgggtggatcacctgaggtcaggagttctagaccagcctggccaacacggcggaaacctgtctctactaaaaatacaaaaattagctgggcgtggtggtgggcacctgtaatcccagctactcaggaggctgaggcacaagaatcgcttgaacccaggaggcggaggctgcagtgagccgagatcgcaccactgcactctagcctgggcaacagtgagagtctgtctcagaaaaaaaaaaaaaaaagttaaatgggtgatgttttagggttctctcagttgcacaccttgggacaagaatgcaaggccaggtagtttatttgggggatgatcccagggaacaccgttaacagattagggagtgacacagggaggaaaaggctgccaagaaatcaggtgtgatgaagaaattcccctctgtggacaactggagctcaatcccactggggacctcccggacacaagaacactcaggtttatccagtacaaggggagaggatactaacatcatcatcaattccctgtcattggctgaacaacatttctgtgagtacaacatctccagtacttctgtcttgtccagtgagtgggccaagtgtgccctggcatcaggagaaagctctcagcagggtcatagctgcagtcatcaccttagggactctgagtgttgaggaggcacaggcaggaccccagcagatgaccccggatggattttcagtccacgaaaccatgatatgctggggtttctccatcccgctgctgagtcaatgggaagggcctctcaggtcatattcccataggatggctcaaggatccatgtgtggtctggctgacacccaggccttcttgagggaggaagaggtgggaggaaacgaagatgaaccttttactcaaatagtatgaaatactccttcatgagccttttaaactggaagagactcggctacagttagtaatcagatttatgtttttctctctaagaaaatgaaggaagcacaagaaaaaattgaccacttatagaaaataaaggctactcaggagactgaggtgggaggatcacttaggcccagagggttgaggctgcagtgagctatgattgtgccactgcactccagcctggaagacagagaaagactctgtccaaaaaaaaaaaaaaaaaaaagaaagaaagaaagaaagaaaaaaggagaaagaaaataagaactatgcattttttgcaccttccataatctccatgattatatttggggggccctttatctgctttgatcattgccatattcattgcatgtagcacagtactaggcacataaaagatgcagactaatgatttattgaatgaatgtatgcttccatatttccctacgagtggccatttccctcccgagatccaagccgttgaatttcaattagtgtattgcagcttctcccagagctgggggagtgttggtattttttctcagacaattaagtgctttagtggagagtcgggggtgaagggttgtgctctgtgccccacacgagctgcgctggcctcacagaaaatggtgagactgtcagagcactggctggtgacggaagggctgtatgtgccccttcaatttaatggccttttaattagtatcaataatagctgggccgtccctcgctgcactgcatgtctgtctccaaggctcattatgaccagggatgaacagcactcctccaatcccttatgtcctcatagtcatgagaccctttgctattacataatgttgcaatccaccatcacacctggcccacagtagttgcttaatgggtgttacttcttttccacttttggccctcctttgaagccccagcaactttaggcattcgaaactgggcctctgcaccccattccttgtagccagaggggtggtagggctggagatgagagtcctcagagagaaagatggtagccacacccaaggcctctctggtgttcaggctctgtgagttgggatggggagatagatggaaccgctctgtgtgcgtagggcagggctgggaccggtaggcatccttctttgatgtcggcataaactctagcaggaaattttgaaataatctgatccagggtttcaaaccagcagcctgtaggtttgaatggctgtttattttttaaaaattcaaataaattcataacatttctttttcttttccctgcttttcctgagctgtatataacattttaatgttgggaaatttaacatcataacctacatttcctgtctctccaaggaaaagaaacaaatcaggtgatctagctacaatgggccccgattccatatggtaacagttggttgaagctgggtagtgaccgcccccgcttagaagggcatgggctcagccaccgtagtcctcacctgacctgcttcccttgtctgtgttatctacctggcctctgcgagcatttcagtttgcttcccccctcactgaacagctggaaagatgggctcagggagggaagtggtttgagttgtctaagcacatacagacaaataatggccaacttaaagccaggctattgtcaatcccagtccagtgctcctatacctcaccactctctgctgctctttataagtttcttcaactagacaggagctactgcagtgggaggtgcggtgaaaggagctcactcagaagtgtatgaatgtgacagctctgtctctgcttgactgggctgttgcttcccatctttgggcctcagcttccccatctgtaaaatggggctaataacaatcctaatctcttagatgtgggagagctctcagaactctgtggagctaggaaatgttattgaacatgattgttgtttcgattgctatgtaaccccaaaactttgtgatttaaaacaataaccattttatttgtttatgattgttcaatccagggtgggctcagttaggtggtttttctagtgatcttgctggtgatcactcttacggttgcattcagctggcaggttggctgatggcggggctcagcagagaagctgggatggctggcctgactctcttcacataattttagtctcttcccaccatgtgttctctccagcagggtagccagacttcttacatagttgttcagggctcccacaaatgagcattccaagaggacaaaccccagtatgcaggcatttaccaagcctctgcttgcatcacaactgcgatataccattggccaacatttgtcacattgagggagaaggcaggactcaactccagagatggggctgaaactctggaccagattgaagactaggtgaacagggaagcagtgaaagcacctctccatgagacatacccagcaacaccacgtcagtttaccacagtgatggcaacacctaaaagttaccacccctttccatggcaatggcctggaagtatcatcctttgtccagaaaattctgaataacctgccccttaatttgcatgtaattaaaagtgggtataaatatgacgacagaattacccctgagctgctactctgggcatgctgcctagggggtagtcctgttccacaaggagcagtacctctgctgctgttggacactgctgctccaataaaagttgccatctaggctgggcacagtggctcacacctgtaatcccagcactttgggagtctgaggtgggtgaatcatgaagtcaggagatcgagaccatcctgaccaacgtggggaaaccccatctctactaaaattcaaaaattagctgggcatggtggtgtctgcctgtaatcccagctactcgggaggctgaggcagaatcatttgaaccagggagtcggaggttgcagtgagcagagatcgtgccactgcactccagcctgatgacagagtaagactccgtctcaaaaaaaaaaaaaaaatgttggcatctaccaccacctgtttgcccttgaattctttcctggatgaagtgaagaaccttctcgggctaagccccaattctggggcttacctgccctgcatcaatatggcaaagtccagaatcaatgtgggaggggactacataagagtatgaatgccagaagcatggttcactggaagccatcaaattaacagtctactgcaattattttcatggggtctaactaacggctagagtagggagagtgggccttcacctgcaaggtgaaactggatagtccccaggtctccctactcagaatgttctctcctgatgaaccagcccagatttgatgtttacctttactttgcagctttggcccagcatgaccaggctttcagagttcacattagatcacagcccacagtgccaatccaaatgactggtatgactgaccatggagaaggactccatggtggacagggggacagaatgtcctgattggccaggcctgggtcaggtgccatcaccagggccagggggaatgaagtcagccccttctgaactaatagtaataatattaatactagatgacatttggggggtgtttactatgtgccagtcactcttttaaacattttatctgaattaactcatataacccaaaaactccatgaggtagatactattctccacatttcttatatgaggcacagagaggttaggaatttttccaggttcacatagctggtcaatggcagagccaatattcaaacctaggcagtcagactttagtttccatactctttatggcctggaccaagaataggagtagaggctcacagaaaaatcagatgctggccaggcacaatggctcatgcctgtaatccaagcacttacagggagtctgggacgggcagattgctcgagcttaggagttagggaccagcctgaggaacatggcaaaaccctgtctctacaaaaaaatacaaaaattagctgggcatggtggcacgacctgtggtcccagctactctggaggctgaggtgggaggatcacctgagcctgggaagttgaggctgcagtgagccatgattgcagcactgcactccatactgggtgacagaggaagaccttgtctcaaaaaaaaaatttttttaagtcagatgctgttaagaatattgggagatgatacagcatagacaaaaatggtatctataccttgcaactgcccactaataaccataaagacatgatgtgccatgtaaagcatgatctaaggaaaaccttcatgttctttatgcagaaacttgggctagatgtggtggctcatgcctgtaatcccagcactttgggaggctgaggtgggaagacctcttgagcccaggagttcaagaccagcctttgcaacataaggagaccctgtctttacaaaaactttttttaaaaattagctgggcatggtggtacatgcctatagtcccagccactcggaaggctgaggcagaaggactgcttagctcaggagttcaatgctgcagtgagctatgaccgcaccacagcactccagcttgggtgacagagagagactctgtctcagaaaacaaacaaaaacaaacaaaaaaattgggtaattgggtatcttcctctctactccagatgggattcttttagccttaggttccccttattggatccaaagttgagaagctcttgggtcacttagtcaagaattcctgaggtatagcaaataagaacatctgggaccacatgttaccaacatctggtcacaaactcttaaaataatatggagaagtagatttggagaaacagatgaagaacacgagggggaatgtgctgggtgacacccacagaaatgcacctggggaatcatgattgaagcaaggatgattgaaaagtctctgcaagtatgtgtgacacttctgagtattgggggtggggtgggggtggaaggcctcatgtatctgttgtttcctgggcactcaatcctttttgaacaagatgctctagagatggttattctcattagaacaaatgttactgacccaatgtcttcctcgtttatatttcttctaatgtgcttctgcttgagcaagtgagcccttaatgtccatttcaattaacatcactgcatctgatctcagtggtgtcactcatggatgcaatgaggggcggagaaaggtcactgggaagtggggagaggtgtcccctcttgtttgaaggcttgaagtcactggtgagggaggtattgggagggaaggtgtggaatgatttgctccctacttaataaagaccatactttaaagatgtcagcctgtcttttgtttgataaaacactaatgtgaagacctagttgcaaggcagaaagcagggacaagggctctgagggctaagccagtgaggaacgggagacacacaaacttgcattgacttatgagagcttcctccataaccttgagctccctagccgtcagtcacagtgggtgggaactgtatgctccaaatctgctatccagtatcctggggattcccagggatggctcaaagctggtggtctgacaccaacacttctgtgtgtggcctgatctcagcatggaaatgggatggaccagagtttggggtgggtgtagcagagcaagcctcagggagaggtagacagtcacaacctgccaacccttccttgctcttgttttccatccttccttcccttccttccttcctaacaagggaatttgttccctttgtgcccttccagagggaatttgttcaggaaagagaaaatatggatttatgttctccaagacacaatcctcagggatgattctctctcctttgagaagtcagagcatttgttttttcatcatctttgccatcaataacaatcattagaagagcttactatttcttgagcaccttctgtgtatcaggggacattacatatattatttctagccttcacagcaaccctcaaggtaaatgtaatttatgcccactttacagaggaggaaattggggcttagagtgcttgaggagcttgtccagtaagtggattgaactgggcccggttcattcgatttctggctccaatgtcatcaattacttgcaatatatacttgcaagggcctggctcctggctaagacctgctaatggatgcatctgaaataagaaatgtcttctattcaagttccagacgtccacatcaacaagcatcaaacacagagtttaacctgcatcgtactggcagtcaagatgcaagggctgtagtcctggttctgcaactcttttgatgggcagctttcagtgtatatgtgtgaactcccctctccagtagaactcccctctccagttgtcatttctccatctgtaaaatgggcaagtttgactaaatatctccaagagtcagctcagttcaatccaatctgacagcacccatggggctttcctgtgtgactgtgccagaaggaaataaagatggacaaggcagacctccattctctaggtgagctaaatgtgtgctctaatagttatacataaagagcaacaaagcttggagagcacggcatctcatttagacttggccagtggcaatgtgtgtggcacaggagatgaggcaggcttcagggtggaggcgccattggcagttgggcttgaaaaggaaatagaacatgtggaggtggagacaggaggaagcttttcccagccaacaccacatggagcagaagaaccacctggtcattctataaaattgtgagaagtaacaaatcattgttgttttaagtcactacattttcgggatgatttcttacgtagtaatagatgacagaccccaaaggtgggtgtgtgattataggctttatcctataaaggtcagagattgctcatttttagaccacagcctacagtaattggcctgcagacataattcatttggcttgcacagggtttttaaaaatagttgagccaacatttagaaattgggagattttatatgaaaatccagatttgggggctctcttgaagaatcctacatctcagcacctgcattctaggaacagtatgcaacacacatcctccagttcatgacagtgctctccactccctattgtctcatgcctaaccttctttctagcccctgtagacacctgagggtttgctgttgttgttatttgttttgagaagggtctcactctgttgcctaggctggatgcagtggtgtgagcatgtctcactgtagccttggcctcctgggctcaagtgatcctctggcctcagcctcccaagtagctggaagtacaggcacatgctaccatgccagctaattaaaatttttttttttgtagagacagggtctcactatgttgcccaagctggtctcaaactcctgggttcaagcaatcctcctgcctcagcctcccagaattctgggattaaaggaatgagccactgtgcccggcatgacatttgagtttttgatccatgctgatgacatggcaatgggaggctattgaaggttgttttttgtttttctgtttttgaggcggagtctctctctgtgtctcaggctggagtgcagtggcatgatctcggctcactgcaacctccacctcccaggttcaagcgattaccccacctcagcctcctgagtagctgggattacaggtgcctgccaccacgcccggttaatttttatatttttagtagagatggggtttcaccatgttgcccaggccggtcttgaactcctgacctcaagtaatcccccccacctcggtctcccaaagtactgggattacaggcgtgagttaccgcgcccagcccattgaagggttttgagcagagaaggaatgatgagagttgggcagtaagtaatgtattggttgggggtaactctggggcaggtgtagtgaaaatctattattcaatctgccccagagcatgaactccatcttttgggaaatgcatctttctctgaccatatggttccgatggggctgccatctccctgtacgtcccacttccttattcacagtattggttagagaatggcacctggcttaagttgggccagtcacagcacctggttttccacccatagatgattggtctagggacggggacttacctatgttggaccaatcaaagtttttccctaaaattttgtccttcagaccagaagcagaaatcctcagtctctctccggtggaacgggtgagagttgtgagtggtgagcgctgctgcagccaggtgcctagccttgaggagaaaagctcgcatacagagagaagagataaaggactgggaggagagtcctggcaacattcaagcctctgcgctcaccacttcagtgcattttctgagcctggttctccagccttcccatcagttctgggagctccccattccttcctgataaattcctttgctgcatctgttagtctgagtttatttatgtttcgtaatttgcaaccgagaacactggtgataaccgggggctttgaggcaattccaggagggctacttctcacccccgtcagggaggagccaagacagggtttatcctcaaatgcagatcccctgaggtcaggagttagagcccagcttggccaacatgatgaaaccccgtatccactgaaaatacaaaaattagccgggcatggtggtacacgcctgtaatcccagctacttgggaggctgaggtacaagaatcgctttgaacccaggaggcagaggttgcagagagccgagatcgtgccactgcactccagcctaggcgacagagctagactccgcctcaaaaaacacacaaacaatgaacagacaaataaatgacagaacaagaagacaaactagagaacatcttgagacaaggtgttcagggaagagttcttttgagaaggtgatattaaagcgagtttggggaagaacgtcccaggccttgcgctcagggtcgtcaactctttgatttctcttccttttgaagcagggcagggaggtcatcaaacaacagaaggacaattataactgctggtatggcaaagccaggactctgaattcaaactctgctccattctcaggaatcccgtctgttaagcaggttctggggaagcgatgtgagtcatgaaatcacaggtcggaggaggcatcgagaatatggtcagttctcaactttcagggaaatccatagctgaggaatgaaggacaacgggcttctcgtgctctcactaggaagactggttcaccggaggctggaacactgaaagtgagaaatcccgacaggagaaatgtgtaggagagaggactagcacctggatcaagttataaaacatctcctgcatctttttcggagatcacccttagcgcggcctctccgcccagtcccagattaggcagcgaagagcgaccctcaccttgtctaggtggcacgttccttaaaagcgaaaggaccaggagtttcttcctgcctcgtctcttccggatccctcctgcaccgcccacagcctgcagatttgagcgccatctccaggccccgcccacctcaagcaccacccctcagtccttccttggggcacgcctccttccggcacccgcccagagtagccacccccggggcccctcctcccctccctgcttccgggcccgcctccttcaggcccgcttccatcttcctcccactctaagcttctcttcagccccgcctccctccacccgtggctccgccctctgggcgattctccatttagccccgcccacagcatctcctttcaagcgctgtcctggttcccggctctccatctcctgcacggccttccccactggtccggcgaccctcttcccagggcctcatcaccatcttagctccgcccctacttcggctccaaacctgtgcaagctgccctcttcccgccccagccccgcctccccaagccgcgtctcagtccctcctccctttcaggccccaccctggccccgccttcctcccgtccccgccgaagctctggacctttccaaagccaggctgagagggtggggagagcccatgcgcctgggaagccgggctgtttctgggcggggctgcagactcctcgtgctcgtgtcaccgtgtccttcccaggagacagagaaggaggagagcccggaaccagggccggagcggcgggcggagccgagctgcggggagccgctccgggtgcccccacccccgcgcgcctcagtggtgccggccgagggcagggctcgcggttgcggggctcgcgccgctgtcagtgcggcggggcgcgcgagcggcgccagctcggggcagcggaacccagagaagctgagggggcggtagcggcggcgacggcgacgacgacgactcccgcgcgtgtgcccagcctcttcccgccgcagccgcccttttcctccctcccttacgtccccgagtgcggcagtaccgcctccttcccagccgcgcggcttcctccagacctctcggcgcgggtgagtggggactgcgggcgtctccttaggggtgcggggagggtgtgtgctttgtgcctttccgttcactcacttcttccggcaggccgctgcctatttttagaaacttatttctgcccttcggggagtcccgggagcccgagtaactctaggccccctccgccgctcctttctcccactcggacccgccgccccgggtccccggccccagccctccgcgcccggtcctgctcccggcgttccctgtctgctctctccgcgggccaagtctgggccagtagttggctgggtgggcccgcgcccgctcggaagttggagtcttttgtgctcgtgccccgccccgcccggcgaggggcggagggaggggaacggaggctgctccggggaggccgcaggcgggcccggccgcggctgcttccggctctcctaacccggactgggtctacgggctcccggaggcgcgcagagcttgtcctgcctcggctcccgcctcttctgggctctttgcacgccttgggctcggagagaaacaacaacgggccctcgaactggggccgtatccgcgtttcactcagcctccttggcggccgagtcttagtttgcctctcggtgacatggggggaaagaaggaaactcgctttgcggggtgttcgtggattcagggagggaactaatatgtgaaagaagtgtttaacaccgacagggaacatttaatgagacttcacccaggaacttcccaagccttatttcatttaatgttcacaacggccttctggtttatcctcatttacaaaagcagaaattaaggcgcagaggggtcaagtaattttctccaagtcacagtagccacagaagtgcaaaggagtggtgccagtacctattatttattaatatttcctggtgtgagcatgtatcatctcttagtgcagagggtatttttacctagccttgggtcacaccatttaattaggggcataactctgggttttccctgacttctgggccgttgtccactatactgtggatgaaatcccattctggggttaccatagttctaaagggaaaggtttggatgaattccttgctagtgttgcggcagttagaagttgatggatgcagactccaggtctcagacacaactcaaattccctggggttttggctcaaggaagctttgagactgtaaacggtgggatccaccctttagtttgtgtgtggtgtgttcctcctcccagaccttgcaggttctctgtgtttagatttatcgatcctagtttgatgggggttagggggagtagctcaagtcatctgccttcaaacaaatattactcctattttcagataaggcccagagtggttaaagtgaactaaaattaactttggcaaatgttccagtttttcaatgtgatccggttggagggagtgtctaaaaatcaggcaagggagtttctgggccaggtcttgaggagtctcttgatgttcacattagttctttggagtctggtacgtctgtggtgcctggccaggattctggatttacgagtcctatgtgggagctgaaaggggtcttaccatctggtccaactttttcatatctgcctttccccgcttccctgttaactgaaccttggaaaggggaagtaagttgtctgaattcagactgccttagtgtcagagtgagaactaaaatttccagtcttcttcctcctaatccagtaatatttttatttctcccataccttgccacttcttaaaagggcacgaaaccacttattcaggtcttaaggtcaggaatcctgagtaattggaaatcccaaggaagttttatagtccccacccctttctgtgccttatggttagtattaagaggaggccaggtttaagcacaggtgtactagttctcgtaagtcaccacttcggttttatgtgtttatggcttatatactcttccataaccattatctgatttaatttctaatccatttctgtgaggtagtttgcagagcttggtttatgtctctttttttactgtgagggaatggagacacagcatagcacttgccttagatgacagaatgagtaagtagtgaggacaagacacctctctggagcagaggatttgatttgacatcataaactgagccactcattgtggctctctgagcctcagtttccttatctgtaaactcatagggttgttgtggggattgttaagaaaatggctatgaaagtgctttatagtggtagtaataatagctaaatttattaagtacttaacgtgtaccaccagtcaatggactgaggactttatggactatattactaattcttagagcaacctatgaattaagtactattattatccctgttttatagaagaaacaggcttagagaggttacattacctgcctcagggtcatgtaactggtaagtggccatggcagtattcagactgcagacagtataaccttaaagctggcatgctttttttaaaaaaaaaattgtggtaaaatatatataacataaaatttaccatttaaccgtttcaaagtgtacatttatgtgacattaaatacattcgcatggttatgcaaccatcatcactgtccattatcttccccaactgaaattctgtacccattaaactaactcccccttccctcctccctccagcccctgaaaactatcgttctactttctgtgaatttgactactctaggaacctcatgtaagtggaatcatgcaatatttgtccttttgtgcctgcaaagctggcacacttagtgtcttctttagtctcagagtgcattgtaaatgcaaaattattagtcctcacctgcagcagagatgtggcatgcagctccagggcaggaacccaggcctctctgagtaagacctacttttctcccccttaggttgatgttctgtatcactgaagcctgttttgaatctctgctggccccccagtatctgcagaagagaccttataccctgttttttttggagacggagtctcactccgtcgcccaggctggattgcggtggcacgatcttggctccctgcaacctcaacctcctgggttcaagggatctcttgcctcagcctcccgagtagctgggactacaggcatgcaccatcacgcctgggtaatttttgtatttttagtacagatagggtttcaccacgttggccaggctggcttcgaactcctgaacctcaggtgatcctcctgtcttggccttccaaagtgctgggattacaggcatgagccaccacgccaggctattacacccttaaaatagaaccgagataactccccaccctcaccttgtttgcacctgcccttctgacagtccagggtttggggatattgggctgcagttatcaggaataacagtgcagtgacagcagcttggatcaaaactactcagaatgattaagtagatcacctttatgaaatgttccctctttcttccccctttttccatagaggcacacaggagggattagcttttgggttcttggaggatgtttatggatactcactgcttgcagttggttaagatggagttagatgctgcatatagcctttcaaaatgccctttgaccgttttctgtgttggtccatttaggggagtgggctcttcatgtttatgaagatggttggaatattgtcctgataacaactgggggttgggagaggcagtgtctcagagatggttaatagggtaacaaacacatgatcatgtgtctggtcatgtcacactctccttaaaaatctgatggccccaacattgcctgcatattaaagttcaaacaaatatgacccatgaggtcagtgtgttgaatttattgaatagaatcttgtagttgagggaccttacagtcatttagaccagccacctggctgacatttgagttggttacttgttgagattgtctttctttggatacctcatttttggaaagtttttcattcactgaagaattaatgagcctctgttagacctggtgctacgcttagggatttgggtttgtatagcgtagtgggaaagataggcaaggaaacaggcagtgtgagaagtgttgtcacagggacagacaccaggagagcacagaaaaatgatgcctaacccagcattggaaggtcagggaaggctttttaggaggagaagttggttaagcctagccctcaagagaacagacataagccaggaaaagaagagatctggggagtcagggaagaggcagagataagactgttctaggtagaaggaacagtaagttcagaaatggtgataataggttaagaccatcccgaaagtacgtactgttactattcccattctgtagttgaaggaaacgggccaagagagctaaacaaatttctcaggattcttgggtggagcataatgcttgaggtgggtggatatggccagacaggagactttcaaggtaggcagagcagaggccaagtcaggaaagggccttcttgcctgtgttgaggagtttggacttcatccggaggtgagggggccatgattcaatgtgcattttggaaggatatctctggctgcctgttcaggagcggactggagagctagaacactgtgggcagagagaccagttaggaggttggcaagaggtgatggtgtttcaaatgaaggttgtgggagagcgtgtgcaagagtgtgtgcagaaaaaagatggaattgctgggcgtggtggctcacgtttgtagtcctagcactttgggaggctgaggtgggtggatcacctgaggtcaggagtttgagactagcctggccaacgtggtgaaaccccgtctctactaaaaataaaaaaaaaattagtcgggtgtggtggcaggcacctgtaatcccagctatgtgggaggctaaggcaggagaatcacttgaacctgggaggtggaggttgcagtgagctgagatcgaaccactgcactccagcctgggtgtgagactccatctcaaaaaaaaaaaaaaaaaaggaaagaaaaaaggtggaattgagtgatgagacaaagattattggtgtggagggtaaggaaggaatcgggatgacatctggtttctacctggtgcagttttgtaaatgggtgctgtttattgaggtgaggacacaggagaagaaggagcacgtaagggagggggtagggtttcttatgcagggtctccttacatatgctttcacttacctctggttatggattctagttctttgtgtcaggtctgaaagggagagagtgagagtatggcacaactggtcatgttcctggctaaactggatgatgcaaacattagtttaggaagagaggagatattcaatcctagacatccgggtgtggcacagcctggaaactgcttacgttaagccaagaaaagtttacattttatccaggctacatcctttggcactggtcttttcgtgtactagtgtattcctaagtccctctctaagccgaagccacttctctgcttactctctgctaggcactgggaaaacaaagataagtaaaacgtatcctaaggagctcatgatccagaagggcagaagtctcagtagcttggatacagcggtggcctggggagagggtggatggggcagggcagggtaggacaggatggagagggacccggaagggtttctattagggataggagtcaggagaccccactgtgtgctccagtctttttctcgggtggcacgtgtctaggtttattcatctgaataatgactagatgacccataaggtcccttctagcaattacattttatgattctaggtggtggtttagataatatatctctaggagaggtatttctttcttcttctcccccttcttagtttggcattggtgaggggatatagtaggggtggagatagcaaggttttcacttgagtgtcttggtcttattcaattttggcttcatgtctatatagctggaagggagaaaatgacagccgtaatgttaacctgcttgtcctacaacttccccctgggtactgtaaggaaattgtgctcagggtgcagctcacagacccttaggaatagagacagagtgcagtggaataaataggaagtcttgtcactagcctgagcatcgtttggtcagtgtgtgggctggactaaggtcctttctttttatagccctgtttcctcataaaatcatctgggggggtccctgaaattctataaaggcccaaagagtgggggtggggaggtagggacagaaaaagggttggaggtccctgtctctctcacttctcccctctcttcgaacgaataagtagaagcaggtatctggccaagtattaatgttggtcatcttttgtttccacagccttgccttatttcctcagtgttagtgtcttctgtcatttcataatggctttcatggtaatcaatgtcctgtacctcctgggaggaaggaaggaaagatgggatattgtccctgggctctagtctccatctccagaagagccatttaagacatccactgccccctgttctctattctggggttggggtagggggttgtggctgaatacttgggtttcttagagggtacatacttgagtttcctagggagtgctctactaactaaagtgcaaatctggctatcttcccaacacaccaatgagtttgactggggaaaatagcagtcagtgggcttttgttgcttgccaaacccatgttaattgtaattatctaatattctgtgggatctctgtcttcctgtctgtgaaacaagggaattggactagataatcttgagtgatatttctacctttttacagttttgtggaagtggcttgagaatttatctctggaaggagaaagggctttgctaaagtattgagagtatctcagagggttaaattctgggttcacaaaagatacctttcagtatataaacagatggatattgctttttagagtggacagattgctgaaaaattgcttgtgagatgaatttatcaaattgtatgctgagttccattataaacttggagctgtagcctcatgggacaaacttggagtccaagactataaaaaaattacattaaaatatgtagcaaactgtttaaaatcacataataaaggaaaaataaaaaacattttaagattttcacacaatggtaataatggaaaaacactagaccagaaacttgcatttcctaagagctttagcttatggagtagatgcctctactgaggttacctggcccttgaagtgccatctgtagagactgaatagctctgttatttgtcaaggtaagactcattgctttattccaagtaaatattctcttttagaatgccaggtttggaagcttaatgttattggccagattttcttcattccagaggcatttatctggtatttagctgtctcctgtttattttattaaggattttaataagcttagttaacggtactgcttacatggtgtctcttgatctatttgtctagtttcctttgaaattctttgtgttagtgaaagcaagcccagcagtagatttaaaagggtcatttccataacttcatttatctagatttgggtttttttggtaagagatatgaccacactatactgagaaatcgaatgttgtttcctttttttttgagacggagtctcgctctgttgctcaggctggagtgcagtggcatgatctccgctcactgcaagctctgcctcccgggttcatgccattctcctgcctcagcctcctgagtagctgggactgcaggtgcccaccaccacgcccggctaatttttttgtatttttagtagagacggggtttcacagtgttcgccaggatggtctcgatctcctgacctggtgatctgcccacctcggcctctcaaagtgctgggattacaggcgtgagcagccgcgcctgaccacgtcgtttcctttttacctgaagcattaatttaaggctttggaattttgtttttgcggatacctgtaaggtggtactgaggaatggtgctgctgccaaagtaataatgagggctgtgcgtgaatcagttgagcacaagaataacttctcttcagactttaaagattcaccctaattgattcttacaccaattaaaatcaacccttactaaaattagggttcagaggaagttacttagttgccgtggcatgattatttatgcttgggagtcccaacagccttccatccctaatctcaaccattcgttccaggaatttggagtacctcctatatgttcttcttatggaaaacataaaaaccaacaagacataattcctgtccacaaattactttcagtcttgagaggaagacagataagtaaagcaaatccagcctgccgccctggctcatatatttggattgagggttcaaacggaaaataacataattggtggctgtatcagtagacaaggagaccagtttgataatctgacttccagtgtgtagactttatttttttggcattcccttctctcccttctgttttttacagatatttatcctctgttgctaaggtgtccaacacccagtgtgtaaagtcaagaatattagagtaggggacaacatttcctttcaggtttaggtgtccagatatctgcatctggacacccacacagttctctggctggcttcaggaagatttggtattgtctcgcttcttatgtagaaatgaagaaaattaagtttcatgttgaattattttaagttttattatgctctattttgaaataaaatagctctattttgtatgcaggtggaattatctgaggtgtggtttctggcatttgatcagtctgtgatttgataattgtgtttatattgtagttcgtgaagcccattgccactgccagccgcctttgaacactttgcagcaaggagccctagtaaatggaaatggtgggcacattgaggctctcctggttttgaagggctcttccctctttcctacccttcagagagaaatattacttgggatgctgtgttgtgctcccgatttcttccaacaatttagcattgcctgtggggtctggaataataaggccatgtaaactggagatgtcatcttctctctctttgaagttccattttctcatctgtgaagtggggttaacactccatatcttgccttcctcacaatggtattgtgaggagcaaattagaacgttgtaaaatcacatgagacaatttatatgtgaagaatccatcagtcatttgtcagtggtaataggtaagtggcagaattttccttaagaggggagatcgatctctttgtagggagcagggagagtgatctcagctggtctctgggattgggaaaaagtgtgatgaaagcatctggacaggggcaatgatggagcaaaagactggaggtgaactgttcagcgggaacagtgagtaagtgttctctaacctcatactgtaagtcctaggttaggcatatgtttacctttggtaaatatgccaaacagtttttttttttttttttttttttgagacggagtctcgctctgtcgcccaggctggagtgcagtggcgggatctcggctcactgcaagctccgcctcccgggttcacgccattctcctgcctcagcctcccaagtagctgggactacaggcgcccgccactacgcctggctaattttttgtatttttagtagagacagggtttcaccgttttagccgggatggtctcgatctcctgacctcgtgatccgcccgcctccgcctcccaaagtgctgggattacaggcgtgagccaccgtgcccggcctccaaacagttttaaaaggtctaccaggttacatggttagtgatgagaaaattgctgttgttctgtgttgttgtaaatacttggcattgtctatctttttcatttgaagccattctggttagtagttatagatatgaattttaagaaccatactatgaattctcacatagcaagtaccataaaggggtacaatgattgggaagttcagaaggggaagagattgcttcctttgtacatggaggaggggcagagggggagttcccaaggaacatttgtggaccagtgagtatttgtgctggactttgtaggataaggataatgaccatctgttgtccaggaccattttaatttctaatattctgtctggttgtacttacagattatgaaataccaatcaatattgccatgtctgtaccttatctcccatactatgcagaagcaacacccagttatcttttctcaaccgatgtgcttcccttccccccttttccagaaagaatggtcacaggtgattaggctgcagagatggagaacattctgtgcaatgggaacaacttgagtagaggcacagatgaatgactagaccgagtagtatccatattcctgctaatgagcaggtggtggaagtgtcccacactttggagatgggtgataccttctcatagcctctcagagcagaacaaggtcatgtcgttatgaagccaatttgtatttaaactggataaaaggatgagaatgagctctttgcttatacttacatcatttcaagaaagaaattaatccagtaaacagtcatacctgaagtatatcaaaagagagtttttcttcttaaaatggttggggagggaatactaaaacctaaagaacttagtctctcagagctcatctattagttgtatatttgctcagggaaaaattgccatttctttgtcagcttttatcctgccggtggaccctagctgggtgtttattttgtgtagttttaccaaatcactttgaaggttggcatgaacattgatcatgtcttagagcctttcctctttgttctgtcagcaaatattagaaaatgtaccttaaattacctggttggggaaaatagggtggccctgcctccttccagagagcagcattttcatgttaaacattagtcagcttctgatcctgtgtcaggtcgcggggtgtttgtcaagatagacagggtgctagagatgccactagggacattcactagagaatttctaggccccctctcgaggagactagtcgagtagttgatttaaaaatctgatgggctgggtgcagtggctcatggcctgtaatcctgacactttgggaggctgaggcaggcagatcatgaggtcaggagatcgagaccatcctgacggagtagtgaaaccccgtctctactaaaaatagcaaaattagctgggcgtggtggcgcgtgcctgtaatcccagctactggggaggctgaagcaggagaatcacttgaaccagggagttggaggttgtaatgagccaagatcgtgccactgcgctccagcctggtgacagagtgagactctttctcaaaaaaaaaaaaaatctgacctgggttttaaatgttaacacagccttgcatattagtgatattgagtgtccactgtgttgagatatcatacttggtaccttttgtttatactaatagagctaatatttactgaaggttactatgtgcgaagccttttatacatataaaatattatttcattctcacctcaaccctaagaagtaggttgtattgatcgtgatcatacagattggaaactgagacaaagggaggttaagagatatgccgtgggcaaccactggtctttttatagtcttcacagatacgtctttgcagaacgtcatacagttggaatcatacagtatgtagccttttcagatttgcctctttcacttagtaatatccatttaagtttcttccatgtctttttatgttttgatagctcatttctgtttaatgctgaataatatttcattgtctggatgtgccacagtttatccacctattgaaggtgtcattggttgcttccaaattttgtcaattatgaataaagatgctataaacaaacaaaagaaagatatgccgtggtcacgctgctgatatgatagatggagttggctaggattgaaacctaaccaattcctctttatttttaatatggaaaatttcaaacatacacaaaatcgaataggttaatgaaatatgatttacccatcacttggcttcaacagttagcaattcattgtcagtcttgtttcatttatacccctacctacttttcttcattttgtgctttgaagaaaatctcagctatcatattttgtccttaaatatttcacagtgtgtctctaaaagatgacttctaaaaacaattataatgccattaccatctttataaagtgtaacagttcctcagtaaaatcaaaatccagatgatcgtgttcaaatgttcgattgttttgtaaatgtcacaaccttattttgatagtttgattcaggattcatataaagtccacacatggttcttaagtcttcaagtctcgtttaatttgtatggtccctcctacagtcacatgctgcatagagatgtttcagccagtgatgggccacagatatgacagtggtctaatatgattgtaataccattttttttttactgtacccattgtatatttaggtgcacaaatccttatcattatgttacagttgcctacagtattcaacacagtaacatgctgtataggtttgtagcctaggagcaactatacagcctatgctatatagtctaggtgtgtagtaggctataccacccaggactgtgtaagtgcacactggtgtttgcacagggatgaaatcgcctaatgatgcatttctcagaatgtatccccgttgctaagtgatgcatgagtgtagttatcccccccattatttgttgaagaagctggatgtttttttctatagatttttccatgttctggattttgctcattgcattcctatggtgtgttttctgtgtctctttgtcctctgtattttctgtaagttgttggttaaggacaatttctcttaaccctcatgacaaccctgcaaaaataggtattgttcttattttgtaggtaagaaaacagactgagagaggtcgggtggcttgtccaaggccccgcctggatttgaacacaggcctacttgtctgcaaagcttttgttccttcatcactaaaccactctgtgagcttaggcaaatcattttaagttctctgggtcagccgggcacacctgtaatcccagcactttgggaggccaaggcaggcggatcacgaggtcaagagatcaagaccatcctggccaacatggtgaaagtccgtctctactaaaaatacaaaaaattagctgggcatggtggcgggcgcctgtagtcccagctactcaggaggctgaggcaggagaatcgcttgaacctgggaggcagaggttgcagtgagccaagatcatgccactgcactccagccttggtgacggagcgagactccatctcaaaaaaaacaaaacaaaagccaggtgcagtggctcacgcctataatcccagcacttcgggaggccaaggagggtggatcacctgaggtcaggagttcgagaccagcctgaccaatatggtgaaaccccatctctactaaaatacaaaaaattagctgggcgtggtggtgggcgcctataatctcagctacttgggaagctgaggcaggagaatcacttgaacccaggtggcagaggttgcagtgagccaagatcgcaccattgcactccagcctgggcaataagagcgaaactccgtctcaaaaaaaaaaaaaaaaaaaaagttccctgggccttagcttctttgtgaccatttgagtgcctaccatgttatggtgtggtactagatggtgtggataatacccatatgagtaagactgtcttcaaggagcatatagtcaatcagggactgcaagaccatatgctatttcagacaaggtcattgtgggactatgggatccttaatctcccttaagagtttcctgcctccctgtcatcctgtcttgctgttttctgtgccatgctattcactgttgcctggtaccttttcctacaaaccatttttgttgtattctccctgctgtaagtctagtatggaagttttggtaaataaaagttcttccagcaataaacttttctttggattgagttactatttcaagggcagctactcttttttttctcttgtgtttggcaaaggtgttattgcttttatggagatgctgaaggaatctggggaacatagaataatgatggaatgaagcatggggaatgccatcctgcatcaggggagaacatatatttagcgttgtactgttcactcccaacggcatctgactgtaatgggggtaattttgctcttttgcaaagacaaggaacttttagttgtgatgttcagggagcagaattttaaaggtattccatttaggggaaccaagctgctgaactttcatcctcattgggaagtccttggggcactcttaaatcctttctgttccagatctgttcagtcttatcctctagatcagaggtcacatactggtagccccttgggctgtatctggcctgtgtacatattttgtttggcctgcagtagtggtgtcattgttttttaaattgagacagggtcttgctctgttacccaggctggagtgcagtggcacaatcatagctcactgcagcctcaaactcttaggcttaagctatcctcacgcctcagtctcctgagtagctggaatgacagagacatgccactacacccaagtgttttttaaatttttttgtagagatgagttattactttgttacccaggctggtctcacactcctggctcaagcagttctgctaccttggcctccgaaagtgttgggattatgtgtgagccattgcacctagcctctatttttattttgagtggaataaaagcctggggagattaggactgcctttcagtggagatagtatgtatgtgtgagatgagaggtcctggcatggggctatgaaggtgactggtttctcatgaaaaaggaggaagatttttgagaaagtagcagaggctagagcctgacgctgaccatgagcaatttttccatttataagagtgggggtaggcctgtcttctccttgagtcctctaccagggatttgttttgttttgttttggtgtgtgtgtggtttttttttgttttgttttgtttttgagacggagtctcgctctgtcacccaagctggagtcagtggcatgatctcagctcactgcaacctctgcctcccgggttcaagtaattctcctgtctcagtctcccaactagctgggactacaggtgcgcgccaccatgcctggctaattttgtatttttagtagagacagagtttcaccaatttggccaggctgatctcgaactcctgaccttgtgatctgcccgcttcagcctcccaaagtgccaggattataggtgtgagccaccacgccccagcctctaccagggttgttatattgtgactccttgtacactggctagtccatgctttagaagcttgtaaactgaagcaaagagacatggcttggatctttgggcaactctttggagcttcggccaaatttggcagaagctttgagtttacaacttcatgttcttcatttctctacttttttccacattctgcttccttattgactggcttctttagacagcatatttgttctcaagtttgtcaaagccacaccatttcctgttgtttctttgatactcaagcccagtgtcagttgccgtttatcaccagagtatagcactttttttgggaaacacttggtcaattcatttttgctacctgcttgccaccaaggtccagcccagctctagaaggaactctaatattgaagagactttacctagttaaggtgctggtgaatcccctgcgactaagtgaattatcttcattttactgggaacttttggtgcccttattggctgataaatctgtctcggcctatcttaggacttcatatggacagcaaactagtcaaggctcagtggatcatgtccttgtcaagttggcattttttgcaatccctattatatatttgtaaggtagagtggaagtgagtctgatgtgtcatgaaggaaaccatggacattaattcagaatcaaaaccgttttacttatgagttggtacctggtctttttttcttccagtggcactctgttgcccaaactggaatgcagtggcgtaatctcagctcactgcaccctctacctcccgggctcaggtggttctcccacctcagtctcctgagtagctgggactacaggcacgcaccaccatgtcctgttgtttttatttttttattttgtagggatagggtcttgctcttttacaaactaggctggggtcttgaactcctgggctcaagccatcctcccgccttggcctcccaaagtgctgggattacaggcctgagccactgcaccaggcctgaaagtaggcaaaagaatcacccagaaagtcacctgctggttccctttgacttcttgtgattactgaaacatcatccagtatgtggagtactgtggtaatttccatgacaactgatcctgattttccagataaagagaggaagctagtaagtgttaggaactcaaaaagcgtagtaagctaagttcttgtgatgctaagtagaatttttagctgaaaggacctttcagcagcaactgcctgattaaacctcttcctcttataggtctggagaggttaagcaacttgcctaagggattgctgtgtttgtggaataaactctggatcctcagcttagtatctctctgtgcctcctattctgcatgacttttttcattatatctcggctgaactgtgagctctatgaaggcggaaaccatgtctgtcttgttgatgagtgttttcccagagcctggcataggatctaagtattttttgagtgaatgaataaactgggtggggggggggttctcaaactggaacacatggctgcatagtagatgatacatgaaatcacaggataaaacatacatcttcctgaagtgtcagtatacttattttttcagagttggattaaatattataactggtaatttaaagtttgcttttaactttaaatatttttatggaatgaatgataaattagcatgaattcttgagataaagtgagaaagcatcaaataagttacaggattatagcaggccctttgacttctaccccagggtgggtctggcatcgccagacctctgacatttttaagagcagctagaaatctaatttttttaaaagtgagatctgattttgaatgttggcagttaactcagaggtttttaagtaaatttttacatatcagacaaaaacatatccttgggcctaaacatctgcttgtgacctatgagataaaatacaggtctgagcagtaactagactttggatggggccaagataggtggtggtgtcagggatatctcctattctgagtctggctccttcagatttgaaactaaccataagcaggagtggaaagaataaagctagagacttgattagaacaaattcccacattaaacatcctctgtaggaaacagcttctataactcacaggctaccatatcccttctcgttgactccccttgttttgcagatgaaactaaggtccagagaagaaaccagagctttcttgtaggacccttaagaagcagccatggggccagacacggtggttcatgcctgtaatcccagcactttgggaggccaaggcaggcagatcgcttgaggtcaggagttcaagactagcctggccaacatgatgaaaccccatctctaccaaaaatataaaaattagccgggtgtagtggcgcacgcctgtagtcccagctacttgggaggcttaggcatgagaatcgtttgaacccaggaggcggaggctgcagtaagccgagcttgcgccactgcacttcagcctgggcgacagagtgagaccctgtctcaaaaaaaaaaaaaaagaaaaagaaaagaagcagctatgggtcctgggcaggccccgcttcaaactcctgacctttgtttggttttcctgcctcacacactcttgggccatggggcagtggcttctgccatagcctgaggtggttgggagagctgggctaaggcttcttggtgcagccctatcatcatgaggtggcggaaggttgccgtggcaggtggtaatgtgctgagcctcttcttggtgcaaagggtctatttctgtcactagcatcagattgaccttattttattttttttgcctagaaagatgtagaagacagctcagcaaaaagaagcctcagggccgagatagatctatccctcgttgtgccttgcttgcctcttctctttctcttctttttcctttcctccgcctcctttctttttgagccctacttaccctttcttctgcatcctcccccacccgccatcctttgtttttttcctcactgttgcccttcttgagaaattcttgtaatgctactgcagtgcgcagagcttgggattgaacctgttttctgtgtttttaaaggggacttgcagtaaaaagtagggcatctaaaatagggagactagacatcttgaaactgtcccctcttcttctccattcccaccccaagtcataaaggataaaatctaaactctggccttggccgcaaggctcatgcagtctggtgccatatcactttgctgccttttgtcagcagcatagtgcttaatacccactgtttccctgtgtttctgcccagtagaaggttccctggatgtgccaggctgtatcatgactttgttttgactacagatagtccctggtttacagtttgacttactgattttttgactttatgttggttacaaaagtgatatgcattcagtagaaacggtacttggactactcatacagctagtctgttttcactttcagtaaagtattcaataaattatgtgagatattcaacactgtattataaaataggctttgtgttagttgattttgctcacctgaaggctagtgttaatgttctgcgcatattcaaggtaggctaaactaaactagggtgtttggtaagttaggtgtattaaatgcattttcccagcctgggcaacatagacttcatctcttttttaaaacaaacaaacaaacaaaataaaaaaaaaaactagctcgcataatggggcattcctgtagtctcagcagctacttgggaggctggggtgggaagatcgcttgagcctaggaggttgaggctgtagtaagccttgattgtgttactatactccagcttaggcatcagaacgagaccttgtctcaaaaaaaaaaaaaaaaaaaaaaaggcatttcgacttacagtattttcagcttacaaggggcttattgggatgtaaccctgttgtaaattgagcagcatctgtatttcccctaagtagaaatccccttatcttcttatcccctttacctgacagactcctgtttatctttcatatcaattccaatgccacttcctcagggaagctttccctgatcactacagaagcagaattaattttgatcaaataaaatacaggatttatagcaggccctttgacttctaggactgctgtagttgtactctagtgctgtgtcacacccaaatcctctctcattcattggatcgagacagtataggccaggggatagtgtgctacttatctctatttcccttgtgtctctgaaataggcttggcacaaatagtacttacaaaatgaatgatggaaatgtgtatgcattgatacttatagtatagtttggtgttgagtgctacagatgaaatatgacagtgcgctttaaagaagaggcttaatttgggggtgactaaaataaaaaattattgacttgagggtctctgttttgcaagaatacataattagcttaaataagcagcaaaaggttagttttaattatgtagcttctgttaatattaagtgttttttgtctgttttacctcaatttgaacagattaagtttgcgtgcatgctggacatgcctcagaacacatgagtagcccgtactagatcttgggaacgtggatcttagagtcactttggaataagttcttatataaatacccccagccttttgagaacggggcttgttaaaggacgcgtatgtagggccagtacctactggcagttggattcagggaaatgggattgacttggcctttggtcctttggtcataattttaaaatatgggagtagaaaacaacaaagaatggaatggatgcttaaaacaatgaaagagcatttatcatttgtctcttgaatgtagagtttgtttttgatttcataattctgcgggtaaacgtgacagttaaagtggtggattatgtatatgtattataatttagaaattccattttataattttactattccaaggtgaaataatgcatttaaatttgggatttgggtggagtattatgtttaactggagttgttgtcaagtatgaatccctcagggaaaaaaaattctgttttaaaaagcagtctgattcttagctcttgaaactattgttacttaaatttccaataattaaaaattaaaaattttaaaattagaattgccaatactttgacctttgagaagggtttcttagaaatacatttagtaatgtccccaagacattagtcttacatttaaacttttttctttaaaacatggtattggttgttaacctttacacagttctgagtactgttaatatctggaaagtatcttgagatatcagtggaaagctaaacagtctaaatttaacatgaaatacttctttatgattcagaaaataaaatcagattttttcaaagtcaaaaaaagaaatgtgacaaagtgctctggaaatttactggaattcttgagagagaactaactggaagaaatcttggaagcttctagaagctggtagcatttgagcttgtccttaaagattcaggagttcagttggcagagatggtgggaagaacattctagatggaaggaatggtaggagtaaaagtaatgaggaagtacggaagccaggccctacctactaatccacctgtcccccttattcagaatttctgccaaatgtgtgctaaatctctgtgggccagcctaaaggatatttacttttcttcctattctttccttcccttcttcctacctcttttgtcctttttgccttttattttttgtttcttctcaatatttccccctttttttttaaatctccccctttctccagtccttcataaaaaaacaaaaaagcaaaaaactttatttacctttctctacctacttcttttttgcacttttcctaggtaacccaagaaatccaagtctttgggtggagatgtgaatcagccatacaatgtttaactccaaataacacctccccttgtgaagctgagaagtaattgaggcataattgcttctcatctgtctcttgtgttttattggcatagacttttttttttttaacctcccacagtgctgggggtgtcattatcattttatttttcgtagttgtcaaaatgtcaattttaatgagaaatttctgcagataggtttgcccttgagtggtaggagccttcaggcaaagccagggctagatgagtcaggaatgttcatggatctgttttctcatgcatacaggtgtataggccacacagaggcagacacctacttttccccatccctacaggctcaatgctttgcaacatgtgcacacacacacacacacacaattgatgtgcatgtatgtcctctcttctatacacaaagtatctcccttacactttcaagccatctattcctcctcctcccgtatgtgcacacatttaccctcttacacccctgtcccactgtcttctacccagatacccagaattgtgtgtgctaccaaagtatctgcaagcctaactcagacaccacactgttcactcccttacatctgcgcacaagtcctcccctccacacatgcccacataatctctgcccgtgccagatgccacacaccgagtaccacagcatcctccacatttctttatacccaggtgctgtcaccaccaccccttaggtttctgtatcttcataacagacattttagtttcagactagttttgaaaggaaatgttctttgctgacagccaagctagcagactgttaggaagttggaaccatttatgatagatcctttggattcaggccgctagtataatgatgggggtaggggaggactggatcagacaatagtgggctacctctgaatgttactgtttatgacccaaggtgagtttgaacctgagttcactgctattggaaggtgatccccatacttagcacaagaaagccaaagctactgcatgtgttccaaatcagaatctctggggtcaggcatagaaactgatgtttttaatgaattccttgagtccttctgttgtgtagccaggttgggaaacacttatctagagaaagaactagaagtaaaaagatatgcattatcttctgataccaccttggacaagtttcttttctggacatcagctttctccactgaaatattaaaaacctatactcataaaggaccctttcagttctaaaatttcatgctgctttatgatgagtttagtctgggatctttttctacctcatagtgtccgttctctgggtctgcctggggcggggcattttagggcatttggccagaggccagcgaggcagcccaggccctgaccttctgccagaagcactgacacagctcctaattagaaatggatcaatatgggcctgtagccaggcctggggagcctgggaggaggctggagcagtgctcctaggtagggagaatgattaccgtgaaatggatctggttacacttgtcaatacaacagttctgctggtgtagcccacctcccctggggaccagcaggcagggctaccctgaacaaacggggaaatggttaacttgtatccctatttgatgtgttttcctcacctttataaactcttacctaatgtgatgctaggtacatcgtataggccccctcttcagatggaaaaatcacttattgaatacctactaagtgttaaatactgagcctcattgtgtttatttctccttgcaacctactggcataggaaggaaaggaaactgaagctcagaaaagtcaaaatgaagtgacttggctgcccattgtcatatagcataatctctattgtactatgctattaatacatttctgagcatttgcaacaccgattccaatctgatgaactgttttctaccagggccctctcttacttacccttctacagactgaacgggagctcaggctgtctccctggagctgttcaaagactggaggaaattctttaaaacctgtggtaaggcaggtgcagggggtggagagggatgctctgcttgcttttactttctcttgctttctcatctcctttccaagttccctaaggggtgagcaggctctaatgggagagatcaatcatcatttgggatcaatgggaaggttttctcctctacggagtgcagagtcaggtttctgaactggccttgtgcaaggagagggaagggattcataactggatgcattggagaacctgcaggcttaacatgctcagcagccagtgtggtcagaccaaattcctcctatagttggtcattcaacagatacttgttgagtgtctcctgtgtgtcagggcttgtgctagtgctagggattcttagatgacctcacaatctagcatcagagtcagacaaagatacaaaccacagtataatgtatgttccttgatagaagagtttataaggaattctgagattccaaaggcatgaatgggggttctcctaggggatgtaattatgatctgtgttttgaaggaagaatgaagggtaagagttaagccaggaagggcactccagaccagggaaccagcacaaacaaaagcataaagatgtgtccaggaattactggtaaaggggtgggcattagagcagtacctaacgtgtagcaaaacagatggactgctctgagcccttatcctttgccagatttaaggttgtagtagtagccattggatggcagtaatgcaggtgcagcaggtagggaggagaagattgatttattagcaagtaccaactgaaacttatttctagacttctgtgggggagaagggaggaagcctgaagagcagcagtcctctgtcctctgggccagacctgcagaggtgttgtggttcttggcattggtttgaaagttcgtctggcccaggcaaataaccttgcttctctcatggcaaaatcttctgcttcacacagcctgcccctcctttctgtgttcttttacagaaagaaattaatggaatctgttcaaaatacccctgaaatgaaattacatttttaactctaattaccctaattaaaacttgacagccgtaatcctggaatggaagatatgctaagtaccccttgcctgtgacaagctcacttacccagatggaatgttgttctgttctgggtttagaagaaaatttcttttggtgtttgttttgttttttccattagcaatttagtcttccaccccacaaatgccccaaggtaggatagctgtacttgtggactacaggtttgcccaggacccctaatctcaatagaggttcctttgcatccggagatggagctcctaatgatccttactacatacctttgagttttttcttcagttgaggttgaactgcagcctttccctcagtgaaatcacctgccttggggaaccaaggatctgtacttgttagaaggctgtcttctggtctagggctaaatacggattgggggtcagtttagggctagtatttaggatacagtttgagcccagggacaaggaggtctaaaaataggatccctcggccgggcgcagtggctcacgcctgtaatcccaccacttcaggaggtcgaggcgggtggatcacttgaggtcaggagttcaagagcagcctggccaagttggtgaaaccctgtctttactaaaaatattttaaaaattagccaggcctggtggtgggcacctgtaatcccggctactcgggagactaaggcaggagaattgcttgaacccgagaggtggaggttgcagtgagtcgagatcatgcatcttgcactccagcctgggcgacacagcgagactctgtctcaaaagaaaaaaaaaaaggatccttctgctcttcacatagctccagttcctttaactcagcacaggtgagagcaacctagtgagatgcctggtcttggcctctgctttaagtggttacctggccagacccgaaaacatgatgggatgggaggtaggggcaagcccataaagcagactgaaggattctttgatgctgtgggtcgtctcacatttctgctagaaccgaagatccccatgttctagtaatctactcagcttagaagcctgttcagtaggcagacactgggtgctctgttaggtactgcaagggacacagagttgagtaagacacagtccctgctcttgagaaacttagaattctgggggagtggggaggtagtggtgggtgagggacaaccatacacatacaaattatgtaagacagagcaagctttattcggtagataggaagcttggccgggcgcggtggctcacgcctgtaatcccagcactttgggaggccgaggcgggcggatcacgaggtcaggagatcgagaccatcccggctaaaacggtgaaaccccgtctctactaaaaatacaaaaaattagccgggcgtagtggtgggcgcctgtagtcccagctacttgggaggctgaggcaggagaatggcgtgaacccgggaggcggagcttgcagtgagccgagatcccgccactgcattccagcctgggcaacagagcaagactctgtctcaaaaaaaaaggaagcttgagtgcccactgtgtaccaggttctgaaaatagtgtatagacatatgaaacacagttcctgtttttcaagaactcccagtaaattagataggcatgtgaaggttcaccgtaacacatgtaagtggaggatgtgctggacagattacctgggaaggaggctagtcagggaacatgaggaaggattaactcccatgggggtgaggggaggaatcattggcaaagacttctcccaggtgttggcatttggacttgtctctgagtagataatattggcaaagggatggagaaagtcattgaggatgttagggaacagcatgaggaatggtagaagctgccaaattacaactcagtgtgattggagtgcagtgtgcaggaaaaggatgtggtagaggatgaataagggtagagtttaaaccatcctgtaggcaaaggggatccactgaggttacaggactgtggtaggaataatggattagtcaacaggtgattggagacagattagttagaacatgtcagcaaactggtggggcaaatctagcccattgcctcttttgtaaagttttactggaacacagccacactcatttgttcatccatgattgcttttgcactacagtggcagagttgaataccacgcagactatggtagcccacaaagcctaattactatctgatcctatacagaaaaagtttgctgacctgtaagaaagaaggtagttatgcaagttctgtaagagaagataaatgtcagaactaggcctgaaatggattgcaggtgtttgaagaagggacatgatttagtagagaacacctgtcctacctaccgctcaaaactataaaaatcaaatttgctgaaagtcattgtctttttcttttttttttttaattagtttattttttttgagacagagtctcactcagtcacccaggctggagtgcagtggtgcaatcttggctcactgcaacctccgcctccggggttcaagcgattcttgtgcctcagcttcccaagtagctgggattacaggcgtgcaccaccacgcctggctaatttttgtattgttagtagagatggggttttgccatgttggccaggctggtcttgaactcctgacctcaagtgatctacctgcctggacctcccaaagtgctgggatttacaggcatgagccactgtgccaggctgaaagtcaccgtcttagtccattttgtgctgctgtaacagaataccatagactgagtcatttacaaacaatagaagtttgtttggctcatgcttctggaggctgggaagtccaagatcaaggggccgcccgcatctggtgagggccacgttgctgcataaaaacctggcagaaggcatcacatggtgagagagagtgggagggctgaactcacttttataataaacccactctcaagatagcagacactttcctgcagtaatgacattaatccattcatgaaggcagagccctcatgcactaatgttgcctctcagagtcccctgtctcaacattgttgctttggggattaagtttccaacacatgagctttaggagacacattcaaaccatagcagtcatggccataaaaggatacttgatacacaggcaagtcctgatttgcctttattagctgcgtgaccttgggccagtcacttaactcagaagttcgggtgaatataataagtagaatatggtgagtagaataaagaaaagactcatcagtcagatcttcctcaggagacggaactctttttaaaaaatttgttcttttaaatttttttattattaaaaaaattttttttaatttgttcttttaagtttttttattattaaaaaaaaatttttttttaaatagagacgggtcttgctctgttgcccaggctggtcctcaactcctggcctcccaaagtgatccttccaccttggcctcccaaagtgctgggattacaggcatgagccaccacactcagccttctctttctttccttttttctttctttctttctttctttttttttttttttaataaagacaatgtctcacttggctgcccatgctggtctcgaactcctgggctcaggtggtctcctgtctcggcctgccaaactgctgggtttatagatgggagccaccatgcacagcctggacaaagctcttattctcttctctataccttatacctcacccctagtttttaagtttgagggccctctagtggaaaagacagataccgtagaaaatctggatcatagtatgagttgagaagttggggatgggtaggcagaaggttttgatcactcaaagcagctgatgttgtgggtggaggggcttatgatactttgagacaccctatacctttcccctccataactgttgacacttgttctggccagtttgaacttgtttctgcccctcaactgccagagcacataaggcccctacgaaactaaaggctggctttatccctcagtcacctttaccaaacagaaactttgtaagtgccacttgatgtccctatgtgcctctccctgccactctactgagcctcctatgcctcacttcctttttccttcagcactgtgcatctgccctgaaggacggaaaaagtaccatctagggagaccacagtggtgagttttaagctcatttctgccttcagcttcctatgtgaccaaaggcaattcatttcatgtctctggcccttctgtaggctccagtgcagattatcttcagccactttttgggacttgggatttcttctctaagcctccagcttcatagcatagcattttttcccccaaagttcccctctcttttcaatctagaatattagtatatgctcaaagatcatttgcttgaaattcactaccttcacctgtgaggagagtagtcgtatctgtttttattggtagagttccaggaactggcagtcagtctgactgctagagtggaacagaccccgtcagcaaggcatgatgtctccaggatgggctgtgtagttcagtacagacaaacttttggccctgggaatccaagatacagtagaggaagaagggccaggcactagtctaggcagtttacgtaattttttcccctcatttatcttcactattctgaggtaggtgatttaatcaccattttacaaatgtgaggacttaagttttagagagtatcatttggtagacagtgactgactcattgtggatacaggaaaacaactgaatatttcttgctcccaagtagggaagagtggtagaagagacaggcaagtgaacggtggtcaaagcaccaaggatacccagttttggtgggagagccatggcttaaacctaggtctatctgctaattgtttctactatatgctgccttccttacagaggggtggagagagcagcaaacccaagtggacatccaggctggcaagcagtctctggacaatggccattggtggggaggcctgtccttggattttgagttgggctttagttcgagggggtgggggtctgaagtcttaagcgggtgactaaggcaggggctctcatgtggagctaaccccatttatagaataaagcacctaattttgtgcactctagaaagtgaagccttatggtcagcactgatcatatgctggagtatcacaagagccccacagtcagtctatggtataatagggccagaaccagtctccttattcccaatcaggccacctctcacctcactcagacttaatacagtatagaataactttggaggggacctcagtgtggaggctggaactgcaaatttcaagcttacatatcagtttttgaataggtattcaaaaaccaatgacaggctgggtgtggtggctcacgcctgtaatcccagcactttgggagtccaaggcgggcggatcacctgagattatcaggagttcgagaccagcctggccaacatggtctgagtgaggtgagaggtggcctgattgggaataaggagactggttctggccctgccactgacttccctctgtgactttggacagattcccctccctgctctggtcttacctccctttttataaaatggttgagcccttccaactctggtctcatcaggggcatgaaagccattttctacacagtctcagttgcacagagcagtgtctggtcggagctttggtgtgttggttactgattataaagctttagattctcacttccagctcaagagggggaaggggaaccatccaactgtctcattagcatggagaaaagaaaacagtaattactcgtgcctcccttgataattcctgcagggttggatcttctagggaaggaggaggggaaaactagagatagcttcagctgagaaaggagaaatgctgttagctgcccagaaaatgcagaggcaagaatgattgtcttgcacatctgttgtattctgtggacgttcctccaggcagcttggagactgcctagattgagtttcatctatttatggcatgcattatgttctcatacgtgaacatgggttgggctcaagacccctaatgtcacctgtcattaagaaaccagctgtcctctagggcctactttttgatacactgggcatcctgacacctgtctttgtttgggagtatgggagggttttactgacccattttgtgtcctggctgcattttttattatgttgtgaggtcattttttttacccccacagcaacacagccagtagttttattatgcctgggcataggcaaccatacagtagagccagtcacaagagtcaaggtcaggtatccttgtgaggggaggagtctgggagaactgcaagaccatggggtttagtaaaggctgggataagcaagccttacagaagggttgaggcagttttgaggctgaggggttagggggagctggaacccaactgtcaaatagattggcaagttggcttgtgggacaagggctatttgccctgtgcctttgccctgtgccagtcttttactccctgtgtgtggtcggttgtgagccctgaagtgctgactctagcagaaatgcgttggaggctgccttcaggggagccctgcctgagggagcctggagccattaggctgagattatctcccgtggctgctcactggtgccttggttgccaccccagaggcctagagaacgcagcttccctttctcttcctctctcctgaggaagataacccttcagcaacacgtctctctctctctctcttttttttttttaagacaatctcagtctgttgcccaggctggagtgcagtagtgcaaacacagctcactgcatcctccgctgcccgggttcaagtttttctgcctcagcctctggagtagctgggactacaggcatgcaccaccacaccacacccagctaatttttgtatttttagtagagacggagtttagccgtgttagctaggctggtgtcgaactcctgacctcaggtgatccgcccacctcagcttcccaaagtgctgggataacaggcgtgagccacctcacctggcccaacacctttcggtcagtcttcctgcaggccctggagcttgcttattctaaacaacaagagttctgtagggacatgctattttaaaaaaaaaaaaaaaaattgttttacaaatgtaggagattatttcctctgttaaaatcgtcttcggtccccagggaatgctccctttctcttgtcccagaccgtttgcttgattccccaccctttgatgtccacacccaggcttcccataattttcactcttcattcacttcctggctcctttccctagcttccagcagtagattcctggttgttttttttttttttttttttttgtggggggtggggataaggaaggtttttcaacaaagctttcatgatggggagctactggagaaaggtccagaggatgtcagtaaccccttagccacaaggaacgatatactcccaaggcttgttagcctggagtaatgctggtagaggaggaagctgtgacaagaggaagaacctgcttgtcttctgacctctgcaggcttcagcttaaacctggcagaggttgggctggggcagggcaatagtgagggctgagggttggagccctgagcaacttgtcgataagtgtttcactttacctcctattgacacatttagtttggagtttggacaagcaaactcccttcatttaacatttacaaagaggaattcctgctgcttctcttttaaataaaagtccttggttctggtatcggaaggaaaaagatcttttccaaagtctagacctcagacattttatttatttatttatttatttatttatttatttatttatttattgaggcggagtctcgctctgtcgcccatgctggagtgcagtggcgtgttctcggctcactgcaagctccgcctcccgggttcacgccattctcctgcctcagcctcctgagtagctgggactacaggcgcccgccagccatgcccagctaatttttttttttttgtatttttagtagagacggggtttcaccgtgttagccaggatggtctctatctcctgatctcgtgatccgcccgccttggcctctaaacctgagacattttaaacctgctcaggtgtctccttccttacctgttctcccttcacccctttcccatcctcttttctctgctccctgcctttgcactccttacatctcccttgacttgtgaaaacaagaatgggaaaaggacaccttaagccaacagattagtagatattcggttgatattcatactggggctgagactctgaatatggagcttgagattttggacttctagtcctcagaataagagttgccgggcaggttttgtttattcctttatttactcacagatacttaggctgacacagagcctggcaggtagttcgtaagaccctaatcctacatgacccaagacccatatgacagttcataagaccctaatcctgccataaggtcacaatcttacggagaagacatagcagcagtgagcacacaacccccactccctccacatcccccgttcaatgattgaattttgaggttagaaagaactttagtttttctggtcttctttcatgttgctgtgtaataagtaaggcagatcatgagagtacacaggctctggagtaaagtaaagcagacctgggttcaaatgctagctttgttgcttactagctgtttgaccttgaatggcacacttagcctcacctgtcttcagttaccttggttgtaaaatggacatgtcatcacctacttcacagggtatcataaggattaacagtttaacacccagccgtgtgcctgaggcatagtagcagcccatgtctttctgtcaccttgcatcaaggcctggcttaaatctttgcttcttctgtgaagcttctgagacaaacccaggtcagactgatttgtttcttcacttccacaatacataacattctttgaactgttagatcctgcctattattagtaattttttgtgggacatcatagtcccatcctgaatgccaagtgcctaaggataaggactgttctcaatcatctgtgcatcctccataaccccttattcagagctgtttacacagcaaagccaaccagtacagctagtatcaggaaatattttttgactaattagatagaaggttcatgtatgtactctgttattcagcttacaagaagaaccataaaagacctggctgggactctcccatcctaactctgcccttttcctcacctgttaccacattgataaaaacatgtgattataaaatccttgtgttggcagtataggaattcccattttgcagatggggaatctgagatgcagattagaactcaggtctcttattgggaggtagatccagactaagtaggaggaatagaaacagaaatcttataactggctgggcgtggtggctcacacctgtgatcccagcactttgggaggccaaggcaagcagataacttgaggtcaggagactagcctggccaacatggtgaaactccgtctccactaaaaacacaaaaattagccagacgtggtggcacgtgcctgtaatcctagctacttgagtggctgagacaggagaatcgcttgaaaccaggaggcggaggttgcagtgagctgagattgcactactgcactccagcctgggcaacagagcaagaccctatcttaaaaaaaaaaaaaaagaaatcttataactgactaggtctccattcttcagaagtagtaggaatttctacaaggaagaaggggaacaggggtactgtattcctgaggccttagctgatggtgagtgcagaaatgaatatacccacaagccggagatgtttcaagaacttggcagatttgggaggccgaggcgggcggatcatgaggtcaggagatcgagaccatcctggctaacacggtgaaaccccgtctgtactaaaaatacaaaaaattagccaggcgtggtggcaggcacctgtagtcccagctactcaggaggctgaggcaggagaatggtgtgaacccgggaggcggagcttgcagtgagcctagatcgtgtcactgcactccagcatgggtgacagagcgagagactccatctcaaaaaaaaaaaaaaaaaaaaaaaaaaaaacatggcagagagagtggcaagaaaagggttcaggattacgtcatagattcactaggccttgaaaattaagaagggtttgaatgtgtgtaaatgaagaagggcaattccagtgagacaacagtgtggaccaaaaatatgagagctggaaagcccacggtagaagtaaggcggatgatgaccagatactggcatacctaagagcaaggctgaggtgactgggagccatgactttttttgagcagggaagtgtcattaggaccattagtctggctgtgtgggtctaatggattggaataggaggggtaggggagactagtgaaacagagaccagggaagagactcctgtaagtctgcctttgtaatgtcagtaagtttcaagaaatatgccagcagtgcaagcaagagataatgtgatcctgaaccaagaggaagttgacatagtagggaataaagaattctttgagaggccaaggcaggtggatcacctgaggttgggagcttgagaccagcctgactaacatgaagaaaccccgtctttactaaaaatacaaaattagctgggcatggtggccggcacctgtaatcgcagctactcaggagactgaggcaggagaatcgcttgaacccggggggccgggggttgcagtgagccaagatcgcgccaggatattccagcctgggtgacagagtgagactctgttgcaaaacataaagaaaggaagaaaggagggagggagggaggaaagggagggagggagggagggagggagggagggagatgatttggatgtagaactcttagagggggagaaaaaaaaaacccacaaggatttggcagttgtgggaatggggaagagagagaaagaggggttgagagcatgaatatttggagtctaagtaccccggagaatggttatgccattctctgaatcatggaggctgggaaatagaagatgaattgagttggttgacttgttgattggaggtgtccattcttgactccctggtgcctctgcctttgtcttttgatccagagctgcagagatcctttggttccttgtgcttgctgctttgttccagacctggaggccccccgcaccctcaatcccttcactcatgacttggagcaactttcattccctctgaaataaaacagtgcttaggccagtacctagtctgtttccaactgtgcggtaaatgcctattaaatggccgttgttattatagctttgagattacagtagctagagattagagaagcctctggaaccacctggctgaaggactcaggagccattcaacttgtattcagtaaaaagcctggactgcaagtatatggagaggatgtcaggcttgggtgtagatgggtggggaactctgagccatgtaaactagaacaagagaacatgtttcctgccttctgtttttgagaattgttatatataatgtgagattaagagggcaagccctggagttggacttctgggttcaaatcccagctccaccatcttgttagctgtgcaatgggcaaatgtacttaatttctctgtgcctcaatttctccattagtaaaataacataccaaccttacaagattgttgtaaagattaaatgagttaatacaaataaaaggtttacatcagtgcctggtatgtgctgctattcttattctagagtctgctctattccattccacattcctgggaacgaatatatagggatttctcttcttcaccatcctcacccagcagaggagggagctgagcacagaaatgtgaaataaatctcagagtccttgaaagtttgtctcagctagaatccaggtgatctaagcctggaggagcctgggccacaagtgagacagagttagagttgtccagaagacctgagtttgactcccagttttaccacttgacttattttgatcttgcgcaagtaacctagtctctgagccttagttttctcatatgtaaaatacagaacaaattccttcttgtgtctcttgtatgtacctcattctccttatgactccactctagctatattattagtcttcttgttccttaaacataccaaggcctcagggcctttgtacttgctattctctccctggaacactcttccctcagatcttttcatgtcttaccccagacttcattcaaatctctctggatgtgaccctttgtagaggcccctccctgaccattttatctaaaatagacttcacccttaccttttgtcattctttatttccttaccttgctttgcttcccttccctccctctccctttccctccccttccctccccttcctccccccctttttttgagatggattctcactcttgtcacccaggctgtagtgcagtggcacgatctcgctcactggaacctccgcctcccaggttcaagcgattctcctgcttcagcctcccaagtagctggggttacaggcgcccaccaccatgcctggctaatttttttttttttttttttttgtatttttagtagagacagggtttcaccatgttggccgggctcgtcttgaactcctgacttcaggtgatccatccccctcggcctcccaaagtgctgagattacaggcatgagccaccgcgccaggcgtgccttatttttctttatggcacttagcactacttgaaattatatactgtaaataattgacctgtcttttgctaggatgcaaaatgtgtgagggcaggaattttgaatgcctgctgcctgttctgagcagcacccctaatggacttctctctctattgtaggtgagccctattcccagaggcaggtggtgctgaccctgtaacccaaaggaggaaacagctggctaagctcatcattgttactggtgagtgaggttgcctgggaaagctctgggcaagcttgggccaacatggagggtaactcgtttggggattgtttttacctttagtacagataacttacaagtgattatcttcctactccatgtctaaaagattggatgttgcacaggtaaccttctgaactgggagggttgagactgctctcctagaattgccacaagaatgtctgagatcatttgccatgaataaggcagagcaggtctgcttccttcttgcttctgctagctgctttctgctgggatgtggcaggtggggggctatcctgggacctggcggctatacctgtcctctcacaagctctttaacatgacctcacagcccttagagacttgttttttgagatggagtttcgctcttgttgcccagactgcagtgcaatggcacgatctcggctcaatgcaacctccgcctcccgggttcaagcaattctcctgcctcagcctcctgagtagctaggattacaggcatgcaccgccatgcctggctaattttgtattttttagtagagacggggtttctccacgttggtcagactggtctcgaactcccgacctcaggtgatctgcctgcctcggccttccaaagtgttgggattacaagcgtgagccaccgcgcccggccccgtagagactttcttagctttagtttttactgtgatctgccaagctcataggtcagctccagaaaatcctgtagtttcttccattctgcaaaatgtcgtatgaataatggtgagagtggagtgattagggttttatgaagtggatgtcaggggaagctgacagatggtgagaaggaaggaaaatcaacgcattaagaacttactatgttactgatctcaatctagacaaaatccctttttgtgtgttggggggggttttatttttgtttttgggagacaggtctcactgtgttgcccaggctggtctcaaactcctgggctcgtgtgattcaagtggtcctcctgcctcagcctcccgagtagctggaattacagatgtgtaccaccacagcctgctctgaaacctcattttatagatgaggaaattgaggctcaggaactgaaataatttgcccagggtttacacctgggaatctataaagttgatgttagaacccaggtcagtctgaccataaataccattgttcttccagacctgaccttccttgggctgttaatctccctctctaattctgatttttcttataaagttcaagaaggcctacttacttagggattcagaaaggagattcagttgaggggctgaacagggcaggtaggagttaggggtccctctgagcagtggtatttctagtgagggggactactagactgaaagataggaagaaccttcaagcaggcagaggcccaggctaaaagtgaccacaagaagaagaatacgtctgtaacacatgggatctcataaacacttgggccagtacagggtaaggacctgagtgctggcttgaagttgagaaacctaggtttttatcttctctctcaacatgtgcccttggacagtcttcatttccctatttgtaaagttggagtgcctccctgtcccctcacgtctcatgtgtgtactcctaccatgcaggtatgttacagagaatcaaatgagaaatgcaagttggaaaactttgtgaattgtaaagcagcatgaacgaaacaagaaagtgagaagaaagcattttaagtgtctgtcttagctcgttttatgttgttataaaggagtacctgaggctgagtaatttataaagagaaaaggtttatttgtctcacaattcgaatgtctggaaaagttcaagattgggtgtctgcacccagtgagggccttaggctgcttctactgtggtggaaagggaactgctgtgggtagaaatcagatggtaagaaagggagaggggagatgccaggctcttcttaacaaccatctcttactggaacaaagagagtgagaattcactcacttcccctaccctccttccagggaggggattaatctattcatgagggatctgcccccaacgatccaaacctcccattaggtcccgccttaaacattggggatcagatttcagcaagaggtttggaggagtccaccatccaaaatatagcagtatctgtagcgtcccagtccctgacctgtttgccgccccattccccaaaagtaaacgggagggttttcctttggaaattttcactgtaaatcttcttctgtgcccttctcctcctctcctttcttttgtgggccctacccatagcttagtctttccataaggaaagggattccagggcagagatgacaaagccaggtagcacaggcagccacgatttgcaatatgtgtgctgcagagtgcaggtttgagtgcactcatgaaccgtggtataggatactacagcagttcccaagagcccatcccaacaggagtcagcactccactgagatgttgccttgttccctgctgtcatctcttgaagaaggctattcctcttttggccctaggttccctgcctgcctctgcttactgctagtgaaaaaggctcttgtgctgtagcctcacattttatggaggccatggtcattccagtttttctaccatcttgttctcccccttcaccaacgatgggggccattctcttcgcactgtgttttaacaatggacattctgttcttctgtctgcctgagagtgcacagagggttttgacccctaccttccctcctactctgaatatccaggctcttgctgccacttctttttgccttgttaatctaaagttctacagcttctggcctttccctggcctgggtgccaagcttggatcttatatgcttcctgtaacaactgccctgtgaaaaagctccactattaacttttaaaatatgaatgattccacgtaaataagtgtgtaatatatacatttatatatgataagctacccatataatagcttatttatctaacagcctcatttttccagagtccaactgaaaaacaagagggaagtaaagcattgtcatccttaagtatttgcacagtgctaatttattcttatttttatgtgttgttgtaacaagtttagcatttggtttctaaaaccccataagattaaaagaagaatatcaaaaaagggagaagagctgctatattaataccatctaggggtgagagctgaaagctgactgaaaggggaggggtgaaagaagaagttaaaacaacagtctgggccgggtgcggtggctcacgcctgtaatcccagcactttgggaggccgagtcaggtggatcacaaggtcaggagatcgagaccatcctggctaacacggtgaaaccccgtctctactgaaaaatacaaaaaattagccaggtgtggtggcgggtgtctgtagtcccagctacttgggaggctgaggcagaagaatggtgtgaacccgggaggcagagcttgcagtgagctgagattgcgccactctactccagcctgggcgacagagcgagactccatctcaaaaaaaaaaaaaaaaaaaaaaaaaaaaaaaaaaacagtctggaggccacttaatttaggagcagcacctccacaaacatcggtgtccctcagtaagatgagggtggggctgggtaatttctgtggtagttttgggttcctctcgaaggctagagttatcagaaaatgttaattatttatagtatctactatatattatcaggcactatactgaatgctctacataaatatatttcattttcatagcaacttggcaggtaggtggtgatattcttattttataaattacttgagagttagagagggacgtgtaggcagtgatcagaagagctaagcttagaacccagaagaatctggcttcagaaaaccaagtttttttatgatatcctacattggctctttccccacgacctaaaaccctggtcctcctcagcctcttgagctagtagtcccccactcctcctttttgttcattctcctatatacgtttttctttttaaagatacacatttattcattcattcagtgagtattggagtgtctgtcatataccaggcacagtttcaagtgtttgaggtgtagcagtgaataaaatagttttctctctgtagtttacgttctagtagaggaaagcagataaatgaataaatctgaagaaaaatagcagggtaagggaatagggagacactggattattaaagaaggcctctcagaaaataaaatttgtgcagaaatatgcaagaactggagtagtgagctatgtgtatctttgggggaataactttctaggcatagagcgtgcttcttgattctaaggaacgaaaggaggccagtgtggctacagatggagtaaacgaagggggagataggaatatggagaagtcacaagggtagacagggaccagatcatggagagctttattctgagttaaataggaagacattggagagttttgaatagaggaatgacataatctgacatccattaaaaaaaaaaaaattcccctgcctaattgtaccagctgggatctctagtacagcgttgaatagaattgataagagcagacagccttccttactttgttcccaattttaggaggaaagtattccatctttcaggctaaggaagttcccttttattcctagtttattgagaggtttcattatggatgactgttggattttgttgattttatggtctttgttctttattctacattgacattacattaattgattttcagatattaaatcaacttcacattcctagaataaatcccacatggttgtagtgtataatcctttttatatggagttagatttgatttgctggggaatattgttctgtagttttcttaggtctttatctgcttttggcattagggtggcctcatggaatgaattgatgtgttccctcctcctctgatttctgaaagagtttgtaaaggattggtattatttcttctttaattgtttgatagaattcatcagtgaagccacatgggcctgggcttgtctttgttggaagagtttaaaattactaattcaaatgtcttacttgttaaatctacttagattttctctttctttttgagtcacttttgataatttgtgtatttttaggaatgtttccatttcacccaagttgtctaatttgttggtaatttgtgtctttttttttcttggtcagtctagatacaggtttgttgattttgctggtgttttcaaagaaccaacttttggtttcattgtttttcttttccattgattttttattattttctgttttatttattttgtttattgtttttattattttctaatttctgctgctttgggtctagtttgctcttttctagtttcttaaggattcgttcattgatttttgaggcaggatacaccccaaaccaaacaattcttcaggcttgactataccagtggactatcagtttgctccttctgatacagtagcctctggagaagtatcaaacttcagagggggcctgattcagaaacaatagggaagacaagtggcctacaatgtatatgtgttaccagtagagagggtgctagggctagacccatagtgctcggcagcctggctcctgcctgccccaaatcagcactgggcaggctgagctttgagtaagacatacgggggtggtgtagcaggaagtcaggtgacacatggcaagccagggcctcccaggcttctgcagaaggttgcctgatacagagctagaagagaccgctgcccgcctcatggacttcagaggcttcacagtggcttttgggggaccattctgaacacctcttttgcctgttacaactgaaattctaagcagagatttgattccattaaataaggcttacagtgcagatgccataggtaacattgagataggaggggctctgagcaatgcctggcttgctggtgacttacttgtggcctttagtttcctcatctataaacaaggaataatagtttctacccagcgtactgtgtaaagcacatttcagataagtgctatataaaaccattggatagtgtacaaatgtacaagactattaatgttagtaattacagtgatagggacctgggatagagtctgagaaggtctaggagcagtagcagtgcatcattgtccttcagggtatggggatgaatgtttgaccagagtggacctgatagcttagaaagggcaggagactcattgtctgccagtgtaatcatcagatggctcctagagaattctatgcaggagcgggtatctgtgggggaggctgccagagcagctcatgtaagaaacagctgttcctattcactctccacccaaggattttggccatattttattactttggttccagaaacagctggcttgcttgaggattgctgtcatagcaaagcaataacctccagcttgcttgggggaaaggaattgcatgcaaagggctctgggctctatgaggtcccgggttcccctgcttccttccccagttttcattaaaactaaagaagatccttttgtccctttggagcagcaggccagagcagaagaacagccaaacaggagagggacctgtaggttagattaactggaaggcagttctagggattttggctgtggcagtgagacagggtcctgagcctgagaacatggccaagagagcaaaatctaagctggataacaacagcttaagaaaccaaggtctgtgagcgttggtggttctagaaccttgagatgagtgagagatgaataaaggggtcttattgaatgggacagattggggggtgctcaaaagctactttaccccattaacacaaagcagaaattgcttctttggaattatctgtcattgtattatttgagtctccactatccatccttcccctcattgccacctcccatatccccaattaacgtaaactgtcaagagtcaacaattctgagtacatagggcaagaggtaaaagataaaagatatctgtggtataactggtctttaggaagatgaagtaactgcatctttcccaccattgtgtgtattcttaataccaagatttgggtccttgatctgacatttattttctgtgtgactaacttctctgagctgtagtttgctcatatacaaaatgggaataataatgcctactttatatagtgattgtgttgctagtagatgaagaaaatacctggcctggcttggcgttcaatcactagtgattggaataaattctgataccatgtgttgagtgtcagattgaagtaggagagtgtggcgatccaggctcttaaccttgttctactgactcaaacctgggaaagcattttatacctgggcctctttttcctcagttctacaaacagggaatgaggtagaaagttggtctgtaattgctgatgtttcttcctgttctgtgtctccaaaggcgcattggtctgtggtccaaggagattaaagagtcaacagggacctaagagaagtctcaacttcggtcctgcttaagcctgcagcaggaacagttaaaaacaaaaagccgctatctatagtaaggtgttagaagtggctgggagtatgctgcaggggcagtgacctgcctgtcacccagcatttggaaaataaatgtcaaagagaagatcataatggcctagaaggttggaaactgagtagctagcaagtgtgagagagggaccatgagacataggacccagattgtgctctatcacccactcattgggtgttcccagtcaagctatttctctttgcatcctccatatccccatctgtaaaaatgagttaggcattgtattctccaagtgcctcttcagggctttctgaaatttcattggccccttttttctggctcttgtgtttgtactctagcttttgcctttggtactgaggatttcatttatgagaaggctttttaaccagccaggctttgtctagccctagagtatttagaatgctcctgaaactatgatttcaggccattcaatttgcatctagaaatgccttggttcacctgatcctactccctcatttaacattgagagataatgcaacagagaagaaagactacaggcttgacaaatgacccccaattcagattcctgccagtactagcttaatctttctgaaccatatcaccatcatttaaaagtgcaataatgggctgggcgcggtggctcatgcctgtaatcccagcactttgggaggccaaggaggaaggatcacgaggtcaagagattgagaccgtcctggccaacgtggtgaaaccccgtctctactaaaaatacaaaaattagttgggcatggtggcgtgtgccagtaatcctagctacttgggaggctgaggcaggagaatcgcttgaacccaggaggcggaggttgcagtgagcagagatcccaccactgcactccagcctgggcgacagagtgagaccccatctcaaaaaaaaaaaagtgcaataatgataatagattcagcacacagagaattatttagaagaggaaagaaaaaactgaggcccaagaggtgaagtcacctgttcaggttcaggttcacacccgaatccagatctcttgtgtctcattccagagtttttttcccctctagagccaaggtcagttgtgcccatatggatatggtagcaaagattggaactgaaagcatgtcagcttttttaacatctccgccaacagccctctcaattcccctgtggcacgtgtcaataacacagcccgtacttgttttagaaacaagcgctccataagcactcctgtttgatttgctttggctggtacaggatccagatgctcttagaatagcacaacagactctccaaatcagcctattcccattccgagccactcacagctctgatctgctgctggctggggttcatccccgagtcttccctacctatcatgtgaatcacgttcagacttttgctagtttgtcctttccctcttgagtagaagtaacatttattgtgtgcatactgtgtgccaggtattgtgacaggtactttaaatagattatctcccttaatctttataactcattaagctattaatagctccaaaggggaaagctgaggctcagtgaagtgaatgaatttactgaagccacatatctagtctctgaaagagctagagtttgaactgagtcctgaccccattgactaagctgtaaggtaagctgtttcctgagtatcatactgcctccctgtcctctggccacggcccttccaggagggtagagtgtttgggagtacccaagaataggcgtttggtgccctgagtgtaataggaatgtcttccatgccttcagtgtattttcctgagagtttctgcactctgtgcctcaaaccaacttctctagaactcagatatagagcccagagatccaagcactgagttagaagctatgtttccatcgtgatcatggaacagagtccctagtgaaaagtatatttgtccttttcaaagttgaatagagagagtatttcaagcaataacccctacttgtatgaccaactccaaagtacagggaaggaaagggaaagggtctgtactcctcaaccgtgataagtctcctccagggacctggcaggagtggagacatgcacacacaaaagattttaggactaagattgttctgataggttctcaaatctgtactcaacagtttgcaaagcagtttaccttcaagaaaccgtactgtgaagaaactgaaggaatctgcctttatgtgacagagccaggggctagagtccaaatctttagtcttgataatgccagtgaggctaagtcttccctgagagggttttctctctggcgttgggcgtacccagtctccacttgcaaaaggagcaggcccttagtctctgtctttttctcagccttcctctgccctcttgtccccctcctcactcattcatactcaattgctagggacttatttcaaccccttatagggtgttatttttaggcacagggtgataggagatattttttgtttctgtattttccccaggatcaattgccataaaatcatggaattttaggatatcagagtgggaagggaccttaattgacaatcatcaagtttacatagtaaccctttttttaaaacatgtaacatccagaacagagcttctggctgggtgcagtggctcatgcctgtaattgccagcactttgggaggctgaggcgggtggatcatttgaggtgaggagtttgagaccagcctggccaacatggtgaaaccctgtctctactaaaatacaaaaattagctaggcatggtggcatgggtctgtaatcccagctattcaggaggctgagatgggaggattgcttgagcgcgggattgccatcccggcgggtggaggttgcagtgaggggagatcaagccactgcagtccagcctgggcaacagagcgagatgccgtctcaaaaaacaaacataaacaaaaacaaccaaacagagctgctttggctgaagcagcagcaagaggcctagtagctcagcctccccactacccttaccaaacaaagacgatccccgctcccgccgaggcagctgccttaaacttccagggttcccaggatcacagttcgtaaaacgacactgacctgaaccaactctcccattttatcattgttaaattgaagcccagcaaaggagagtaatgtgccaaggtcacagagtgaattagtggcaggtgccctgactctctgcctggtgtcctttttactaccctgagctgtatgtcattatgtcatttcgttaagtgaccacttctaacacttgactggcatcctgtgcctgggtgtcaggcttctcttgcctcatgacatctggttcctgtgaggtaggcaggcttgtgaatgtgtgtacctcgtcagggcataattttcatacatagagtgagcatgtgtcaggttttgtttaactgattaatgtggaaaccagcagaagtagaatagctgagaaatcagatttagattgttaatgaaagaaggattgctgaaataaaattgttttggttagtaccctaatgaaaatataacctttggaaatattttatctgcgtattaaaggtatataccttcttagttttttacacattaacctcttactgcagagttttaaaacatttgggccctaatcgtttgtgaagaataacaaaattccatttcccaagagtgtcagatgacttagttcatagtaaacaatgtgtctaacatgacttttaagtggtcacacaatcatctttttgccttccaaattttggataattttccttaacatacaatcactaaaaatgatcagaacctcttgtgttaaagccagctagagccatcccaacccaggaaggcagctttctgctcagggaacagatgtgacctctttactaaggtttctgcagtcagcagccatcaacaagatcttgagctcactctccttgcagccctgctcagtggcctgggatttggcctttgctaatcctagacttgcttctttttcttcccctgctcaaggaggctcttttcttccttgtggtctcaccctcaggaccatcttggatgcaaagaggttacagagttccatttggaggaagtttattttatgtgcagagccagttctactcagaataggcagctgctttcattatgtggttttgtctctgaacatgttttgtccatctttccatccccactgctaccacccaaggccagatcttaataatctgtctctggcagcgttttaattatcaactcacttgccactccatgtccagtctttaccctgaaatataaccttttctctctccatagcttttaagacacagatcttattcctgtgacttccttgctcatgaaacctctaaaatctaatcttcttagaatgatatttgaggttctgcaaagacttttgcccttttctttccagtcctttctccaatcgtctcctcataccctgttccatgggggttcatactagtgggtaggaatattagagaaaccatctttgggacagtatgaaggttaggaaggattctttgttgtggggccatgttaagatttaatttgataaaactttgtgctcggcacagaagtaagtcttaggaataaggagtagccaaacacatggttaaggcttttggagcctgtagttgatgaagaaggacaggaaggtaaagtaagtaggctagagcgataatcactctgaatggaaacctggagagagtgctttaggagcttggaggggaccactacctgagagatgaaggaatacctcccagaagaggtaatatttgagttggacttcaaagatgaggcatttggtaattatgaaggggagactgtaacttccaagcagaaagaccagtgaggacagaggcacagaagcttatgtgggtgtttcagagaagggaaaacagtccattgtagccagagtataagagttcaggaataggactgtggttagggttaaagttaccaaagtaagttagggtcaaactctgaaggacataatattggaggctattgtgtatgtactgtgttttacacatagcatgcaacaataattgattaattaggtgatatatatttgtctatttgtacgagtatgtagctgtgtgttggtatgtgcgttactttttttttttttccgagatggggtttttctcttattgcccagaccggaatggcaatggcgtgattttggctcactgcaacctcctaggttcaagtgattcttctgcctcagcctccctagtagctgggattacaggcatgcaccaccacacccggctaatttcgtatttttggtagaggcggagtttctccatgttggtcaggctggtcttgaactcctcactttaggtgatcggccgacctcaggtgatccgcctgcctcggcctcccgaagctgggattacaggcgtgagccaccacacctgacgtgtgttaacatttgaagaaccattgaggccaagcaaatatcaaaaattgaagccagaaggacagattggacctaagcttacctaggcttggagctcctgagatgttccccagttccacaagcccgtaagttagtcacagaaagccagcattggaagggaccttagggacagtgtttatacttacatacattcagttatccattcaacagatgtctgatactgcccatagaactgggatacagtaatgaacaaaacaaggactgccttcatggaacttgttatttatttatttattgagacagggtttcactctgtcacccaggctggagtgcagtggcatgatcgtggctcactgcagccttgacctgagcttaagcaatcctcccacctcagcctcctgagtagctgggactacaggcatgcaccaccacacctagctaattaaaaatttttttttgtagagccagggtctccctacgttgcctaggatggtctcaacatcttgggcttaagcgatcctcctgcctcggaggcctcccaaaatgttgggattacaggtatgagccactgtgcccagcgtagaacttattttaatggggaaaacaatgaaaaaattagtaaatcaattatgtaattctatatgcattatgaagaaagataagcaggagtaaaatgttaaaaagtggccagagtagacctctctaaggaggaagatcattaccagctgagagaagggcaggtgaaaaggccctgatgcaagagcatgtttgtagaataattagaaggcagccagtgtggctggagtagcagcagtaaagaggaaagaggcaggagataaggttggagagtgggcagctgaggccagaacatagggccccgaggtccattgggctgatgaggaaatgaagttggcatgtagccaggatcacacagcaagttatgagccaggccaggattgggaacgttctggttcaggctcccttcctttgctctctgccatcttctgtcttttggccaatattaacttgaatcccatttaataccttcattttcttctccctcatgtagctctctcccatttctcagacctacatttgctcacatgatttggtaatagagtgatttctggaaggtcatggctagagtggtccttggacatcttttagttaaatccctggtattagaaatccacagagggaaattggcctgctcaaggctacttacctagttaggagtaaaacttgatttcttttccccagttctcttgccgtctggtgtctggctcttcattttctgtgtgccgttccccttttcttacagtttccagcggaagggaatcaagttgtgacccatgtaattgacacaagcagctagcagcattccaggaccccatgccacctgccctcactttagctttttgtttggtctttgtcatgtgaatttactgtttgattcaggccggtgtctttgaactactaccctctgcaaagacatgttgctaactctgcatccttgctcatgctattatttccacacctgaactggcagcctgctcttaaccacaggtctgtatccaggaggcttgtctttgaagcccagccccagtcttatctccaaagaagcaatgtggaaagaggataaagtttggagttggatatagttggatttgaatcccagctttggcacatgctgggaccaaagaaatcttagacaagtaacttgacttctgggagtggttttcctgtttgtaaatgaggctattaacacctgcttcatggggtcattggaaggattatttaaggtattgtatgtgtacatactttaagcattgggtaaagagaaactcttattcactcctcctcaaaggtgccttctgaatgccctttgcctttttcgtaatacttaataggtaacatttcttgggagggtttctgtgtgaccggcactttgctaagtgtccagtgcttttaaaaggacttaccactgcaagtgattccatagttgtctccaaataaaaagttaatttttaaaaagcactgatctcattttttatatatttgttattcttgttgtgtgtagatagaggccaggttaggattcagtatatacctgtgttccagttgttgctctgtgattttctagctgtgtaaacttggacaagtcactggacctccactctttttttttttttttttttttttgagatggagtttcgctcttgttgcccaggctggagtgcaatggtgtgacctcggctcactgcagcctccacctcttgggttgaagcaattctcctgcctcagcctcctgagtagctgggattataggcatgtgccaccatgcctgactaattttgtatttttagtagagatggggtttctccatgttggtcaggctggtttcgaactactgacctcaggtgatcctcccacctcggcctcccaaagtggggggattacaggtgtgagccaccatgcctggccttgacctctattcttaatgtgtttttcacactagagccctaaaattcaacactagttacatttggaaacctgacttgctaatctgctgaccttggaaaatgtgtctttgttgaatacagagcagtagtacctgggctggccctgtgtgacttagagcggacagtatgggaggtggagaactgggtgcatgggagccattagatcaagaattggaaattcctcacaaataaaaggtttctggggtaggagcagggggcagtgttgatggtgactctgcttggattatcttctagggatggaggattgccagctccattgaatggaaggactggtgatgcgcagccactcttgcatgtgcccgggcaaaagacagtgtgttggtggcaaatgcctaatgtgtctatggctgaccatgggccatctctgccattcaagacatcagctcctggcagagttgtattggtttgatagagctttagtcttcggagtcgcacagacctgagttcaaatccttctctgccatttactgtaataattgtgttccttaggctgatcctttagctctcagatcctctttttccttttctctaaaatgatgtggttgatatctgcttttgaggttgtgaggatttaaaataacaggtaaataggtgccacacagtaccagatacttagttgggtgagtagcctggtgatctgtggctgttagctctttgaaggccagtatccctaggagatagcagcaacgtcagcactgctctgattccctgaccaacccccaaccccacctttgccctcagaaataccctggacccttgtttccttcctcaagttcagaccccagaaatgttgggcaagaaggagcctccaggccaggctttattgtgccagatgttatatctgagtaagcaggattgttacacagcagagatacaggagcagagcaggtagctcaggcagctgctgatgaacaaaaggcttcttctctctgttcccaataaattggtccttggggatcctagctttgaaattctaattgacacaggaaggaaaagattcattaggctctggactcgttaaaatgctctgctgctcacctacgatttattcttggcacttcatcaagaggaattaagtaaaccaatgggctgggaggctcctgacagcagagtcgtgtgtctctcgtgctcctggggggatgagagtgttgggtctcctatgctatggagcatatagctggctttggaatctcctcatccctaggacttcacatgagtctaagtctcatatgcttttaacaatggagggaccttctgagatcatactgtgtaactcatttatagatggtccaaagaagaactgggacttgctcaagatcacgaaacgcattagtagtggagttagaattagaatcagtcaggctgcatgacttccaggtcaagaatattttctctgcggccgggcgtggtggctcacgcctgtaatcccagcactttgggaggctgaggcaggtggatcacgaggtcaggagatcaagaccatcctggctaacacggtgaaactccatctccactaaaaatacaaaaaattagccgggcgtggtggcgggcgcctgtagtcccagctactcgggaagctgaggcaggagaatggcgtgaaccctggaggcagagcttgcagtgagccgagatcgcaccactgcactctagcctgggagacagcgagactccgtctcaaaaaaaaaaaaaaaaaattttctctgcatcacctttggatttctacacccagtgtttcattcattcagccttcaacagatacttttaacacattctgtgtgccaggactctgtgataaacaaaacagccatggaggaaagtaaatacctgacccagtattaggagagattagaaaggcctccaagtctgagagatggataggaattagctcagcaaggagagatgaggaaggttatggctgaggaactggcatctatgaaagccagattcagctttcccttcagagcctggctttggcatctatgaaagccaggctctgaagggaaagttgaatcttgctagagtggagaattgaggaagagatgagatgttaaggcaagccgagtctatgaggtttgggccactgtatggttgtaaagaaccctggatctgggattaggagtcctgagttctagatatgtttctgctaccaatatgttagtcatcattctagtaacacttcacatcttttaggtgtgccatgatgggcactggggtacaaaaatgtgtaagatgtatgtagtcccctccctcagagatctgtcagtttaatgaggcaagcaggctaattaagaacccctgtagtaaaggaacagttacctctgctgtaagaagtcagaattgagctgtgtgttactttaagcactttctctgggctttgatgatctcacctgtcaaatggtaaataaccactgtcctatgtagctggtaaactgatgagaagacagacaactttgtaatgattggcgtttgtttggcattttgtggatttcaaaacacttttgacatcattaattcattgaaccttaactgcaatcttatgacttaggaaatttccccacaatgtacagatgaggaaactgagagaggttgaggcttgttcatagtttcacagcttttgattaacaaaagttaggattataaatccaaatcccgtgctcttattttgaaaagtataaagatggcaacctttctttctatcccctacttagtggcaaattatccccttccccttttcacagtcaccagaaatgcagagaatgtctgctgtgtttgaaaagcagatctaagctgactggggagaaagaaaggagcttatttcaggtcttcttcaggctggactctaaacttttaagatcatgtgcgcccgtgctcccatcagctcctgctgttccatctcatgccatttacagagtgccatttactgagccactacttcattggctactcatagcaacttgtggggtagacaaagtgcactttacagatgggcaaactgaggtccagagtccctgaattgtacatgtcagaaccaggattgaatctagaagtcttgggctcctgacaccaaacaggtgctcttaacttgcagaatgtaggttcctttgattcagttcggttcaaacaattcttgaatataacccatgtgccagagactttgctatgcaagagagcctctagttaggctcaaaccgtcttggtctagtgccttacttaagaacagggacttgtattatttacttctctgtccccaggcaggaccttgatccaaaaatgctttgctgttgtttttggccttaatctgccagaaactagagggagcagatggccacagcaatgtgggttatgaggatgtgatatcaggcagggttgaaggatgaattgagagccctgcacccaactacttctgtgtctgtgcctaggcccttgtcagggtagtctctatctgagagtgtagctggtcagcctggtcccatttctcatttccagtcacctccccctcttgccatcccatataatggggttagtctcctggacagatctcatacagaggctgctgggatctgctgtccaaatgaccctttggacctatttcccagccatgttccaagatgatggtgaggagtctagccccacagccagtatgctatctctattcagataactcccagctcacaggcctcccaccaggctctcacccactctgatgttttcactcctgactcctaagaagcagattggcaatttagtgtgagtctgtcagacagcctagagagtaatcaatactgagagaaatggacatatttcctgtttattcaaaatcctgatgaaaattttaaggagcactatttgggaagggatgactgggaaccttgcaagaacaaacagcttaaaattcatgaacagaaatagcaacgtttattcatgatgtttcaaatgcccctaatattcacatctttatatattacagacccctttcatacgtgttactgcttttgaaccttagagcaactctgtgagggaagcagtgtaaggattactattcccacttgacagttgaggaaactaaggcccaggaagctttaaagagagttagggaccatctgatagtcatggtggcagagcccaaaacagaaccaagatttggaaaatgagtactcctgggtttgaaatctggtgctcgccactttctagttgtgtgacctttggcaagttacttggcctctctgagctcagtttccttctctgtaatacgaggataacaatgtctactccttatggttgtgtatggatttaatgatataattaatggaaaatgctagcacagtacagaacatgtgttaggagcttagtaactgcaggtatcctatctcataggatagcgttttcagtatattgcactctgagtctttgaaatttgatactttttttttgtttttgagacagagtctcgctctgttgcccaggctggagtgcagtggcgtgatctccgctcactgcaagctccgccccctgggttcatgccattctcctgcctcagcctccccagtagctggggctacaggcgcctgccaccacacctggctaattttttttgttgttgttgttgtttagtagagacgggttttcaccgtgtttgccaggatggtctccatctcctgacctcgtgatccaggtgccttggcctcccaaagtgctgggattacaggcgtgagccactgcgcccagcctgatactttcactacagtaaaatggactacatataataaattctcattaaccagagtatcatttaaatgcctcactaggttaagagaactggataagaagggaagcagggtgctccaggcactggctaagtactcctgatgcaaatcacagtaggttagagctgacagggaccctagagatctgtcccagtgtgtcttcctcaaattgtgtcttcctcagaagagatgttaataatttgggaaacatcagattgaataatgctaataagtaaatttctttaccgctgcctttgcagacccttattgtgtgtgtctcttgggaacgagttgagagtgcaatatgccaaatttcctcttcttatttaaccttggagccccttttttgaggaactctcattaacatcttgaggaaccctggttttccgtggaagatttcatgtaactgactcagtccagttctttaatttttaagatgagggaagcttaaggtctctaaccaaggtctacagcccatggcagaaccaagtctaaatctcagggtgcctaactttttcctaggccacaccataatttgtactccactattgttccttttctagccagcaaatcctaaaattacagaggatcctgcaaaccactaatcagagagcattgttagagcatcaagctttctgttttgatgtgtttatcccagtaggcaggaaaatgaggaaacaacaggcttaatggccatcagatgtttccaaacagttgaaggaccaggggtcaagtaattatctcagtaactggaaaggtgcccttaccgtgcaaagtcgaactctgttcttcctgctgtaagaaatttgagttatatctgggggactcatccagtaggcccacagtccccacagtccagctcctactaagaactaagctctgacaccagtaatataaaaaagatcctgagaggggtttgaagagaatgtgtaagtttctgctcctctgtcaccgtctccatcacaaaattgagggggtaggaatgttctgctggatttctatccagacagtggcagaggaagttggctttggcatttagtggggctatccttgcattttactaagccctctagttaagatcaaatcaagtttaaaaagaaactttttttttttttcactctgttggccaggctgatctcgaactcctgacctcaggtgatccgcctgcctcggcctcccaaagtgctgggattacaggtgtgagccaccacatccagcccaaaaatatcacctttaaatttgcaagtttatatggtagattgttcaaagcacatctgatcacaacacaatcccgtgacatagaggttcttttccatgtatcatatgaggacgttaaggttcagaaaagagatggtgacttgtccagggtttgacggcaaattagtgatagacccttttcacaagtgcctagtgcaaggccaacatttagtagatgttcaataattttttttttttttttttttttttttttttttgagacaaggcctcgctgtgtcacccaggctatagtgcaatggcacagtcatggctcactgcaggtccaaccttctgggctcaagcagtcctcccacctcagcctcccaagtaactgggactataaacatgtaccaccatgcccggctaatttttaattgtttttagagacaggctcccactatattgcccagactggtcttgaactcctgagctcaagcagtcctcctgctttggcctcccaaagtattaggattacaggcgtgagccaccatgcctagccaagaaatatttattaattgaaaattttagtacattctcagggattaacttatggtctcctaactctttgcccagtattctttccattaagatagcttggtggggccagtggttgggcttcatctcagggtgaccagataataaagagagggagggctgaatctctgtcactattgatattgctgacaaggatggcattttctggcctttgctgctgtccttatacatactacccactacagaaagcccagattcagtagtctctgggctgcagactcaagcttttgttgcctttgctccctgtagtatactgaacaatgatgccagtgacccccagcttctcactctgccttctcctttattttctttctcatcagtgtcttacatctccttctattctgctgatggatgaggaatttgagctcatctcacaaacatcagctacacggttcactgttaaggagttgttgtatcatgtaccttgggaaaccatttactgaaaaacgcccacctaggattctttcacctgttcactagcagaaatttcactggttgctagtatagtgctggaggctgggattgcaaagattaataaaatagtctctgccttcaaggagttcagaatttaatggagggagacagatgtgtaaatacaaaagtgcagcagatgttgcagtagaggtcagcagagagtatctgggtccagaggagtgagtggctggatctgcctacggggtgggatacaaaagctttcccgaagagttttctacagggacgtcacatcagtgggtttgtactcagaaaactcctggccccagccaccactgccagatcagaaattggttgcaggctgggcatggtggctcaagcctgtaatcccagcacttcgggaggctgaggcaggtggatcacttgaggtcaggcgttcgagaccagcctgaccaatgtggtgaaactttgtctctactaaaaatacaaaaattagccaggcgtgatggtgtatgcctggcatcccagctacttggggggctgaggcacaagaatcgcttgaacctgggaggtggaggttgcagtgagctgaggtcacactccagcctgggtgacagaatgagactgtctcaaaaaaaaaaaaaagaaagaaagaaagaaattggttccagttgtactttattgatgaagcggtctccctcttaaccttactcaatgttgagtatgatattttgagctatctgttaaatgggggcaatagtaataccattttcatttagaaaattcctgagcacttaacttgcattatcttaacattatctcattgaattctcacaacagccttatggagaaagtactgtaatattattcccatttttacaaatgagaaaaccaggcacagagaggttaaatcatttacccaggatcatacagccaacgtatagcagagctgggatttgaaccccaggtagtctgattccagagtcattttcctaaaacaaccccaaaaagagccattgtgaccttgatataattcttacctcaaagagttgtaaggatgagaatttaaatacttagcaatgtatcttccatgtaataagcaattaatataatgatcatttatattacattctttcctaaatgctggggtggattgggctgttgcaaagatactgccttcctgtctctctccaacttttcctggctttagcatctgtgcagcctgccgctttgtatcttaaacagcatagataaggaaggaagcaggggtggggcatgggggctgtggtatgtggctctgctggagttcaattcagcagatactccctaagcacccactctgggctagagcctgttctgatgccagtggggatgccaagatgaaatagattgtggtccctgctgtccaggaattcacagtcagtctgggaggagagatgacactgaaacagagtattttaatacaatctcctcaggtggatcttagccagcacatcagaccccactgcccaacggctcataccacaactagcagggcaagaatgccttgctattatattgattgttaaaataataaacttgttaatatctttgacatcattaaagtcactgttattaatgtagaaagtagcagtatgtcttattgcatatattacctccagttaatggatccatgggcactattggtgcttccatcacatgtctagcaatgtgcccaaaaatctctatgttgcttgaggagaggagactaatacatgagacaaaaagggtttggcacaagatgggatgctctgctcaggggttggattggtggttcagatgctcagaagctatagggacttacaagtgcctccttactgagcactgggctgcgtacaacatcagaacgggtgatggctcactcttcagtgtccacaaagccctttctgatctgatctcggctaggcactctagtatcatcggcatcatttcttgttacatcctagactctgggcaaaccacaatacatcatattattcattaaatgtgggatctctgtcaaacttctgtaactttccttatgctatttcctcttaaatgtactctcttacctgtgtgtgggttaacttcaactcatccttcaggacaagattggaacttactgttgactcttcttgtctgagtcgtctccctttctttctgtcccttaggtaattgacatgcctccaagttcctagttgctcctgtcatagacctcatcaagatgaaacataggttctggttttcttgaggttttcaccactgactggactataaattcttccaggggggagattgtactttattaacctctgtagttttatacagtgtctggcagtaataggtgaacaataaatgattttttgataaatgagtaaatctttttagcatgttattcctctacctaggaacctacagtaacttcatggcactcaaaactttgtagactcaaaagctagtaaacacagtagactatacatcttcacatgtacatgaaaacagtaatgaggatttgattttccctactaattcacctctactctccctaccccaccacctgcccaatatggtaatacatggtgctgcgaggttgccatgaaagtggcattcattggagataacagtgtaaattggtgtaactcttttggaaagcagttaagcaatgtgttgccagagccaataaaatgttcatatatttgaccagtcattccacttctgggagtctgtcctaaggaaatagtctagtttatacaataagctttccctcagatgctattgtttataatagtgagaaattggaaaaagcctaaaagaccaccaatctaaactatgataaatctactcagggaaaaccacgagcttttaaagcagtagtgtaaaaaatgatgcttaccgaaaactatgcggcagtaaggacaaatatgctataatatatataataaatgtgttataatgctaattgaaaaaattaggctacagagttgagttatctaaccatgtaatccaaacataatgtgcaagaaaaacactggaaggaaatacatgaacatgctaacagttatgtcccatagaggggtgggggttagatgatttcatatggtaatttcatataataaacatactcaatataatagcacaaattcttacccaaattattggttaagaattttaaaataataaaccagccaggtgtggtggctcacgcctgtaatcccagcactttgggaggctgaggcgggcggatcacgaggtcaggagatcgagaccatcctggctaacacggtgaaaccctgtctctactgaaaatacaaaaaattagctgggcatggtggcgggcgcctgtagtcccagctactctggaggctgaggcaggagaatggcatgaacctgggaggcggagcttacagtgagccgagatggcgccactgcactccagcctgggcgacagagcgagactccgtctcaaaaaaaaaaaaaaaaaaacaacctctgatcttacccattttaaacaaagaaatgatatggtaatattgctgtggtgacagtagaggattatttaaagaatggtaataagaatggagagaggggggctacattctaaaaatattgaggccaaatgaggagggcgtggtgaataacagtatgtgggggaaatgtatatgcctaatagagaacattggttcatggagtttaatgagatgtccaaggtcacacagctagtaagtggctgatcctggatttaaaccttgttctgtctctgtccaaagccatgccctttctcctgcagctgagacacctattacagttttggagaaactttttttttttcttttaaccagttgcagtgtagaagcttgtttagtgtagtgcctcctttttgaggggaagggggccgggaagggttaattctttctaagacaatgacaagggggaaagaccatagataccaaagctgcttctgtcatgatcagttgaattgatgagtttagaagttcactaggcattgggtgtgttatacctgtcgttttgagggctgttttttgtgaagttgcaggggttcattggttggctttcgtttgatgcttagcttatggtagcagggcatcttggacataagcgtgcatatgtataccgtattacatgctaatgaacattttgttcattacaccaagtttattaatgatgctgctgctgtgggagtgagagaggggtcagggtggcagcttcaaacaagggacagtgtctaagctgctctctgaaaggaacggttcacctgaaccatacaatgccctatccccatacttctcaatgactaatccaagaaaaggtgattttgaacttgagtctatcctttggagtatgatactcatcccttcggaagaacccatttcacattgacatgttcactctctgaccttaggcatgttctctgcgctagggtttactctctgcactagggtttgcctaatagagaacattggctcaatgagtttaatgagatgtccaaggtcacacaactagtaagtgctgatcctggatttaaacccactagggtttactcatttataaagtgaatgacatataaccactcagaggattgttgtgtatagatttggtagccttaactcatgaagagtcttgtaagccacattaaaggatttgaacttgattctttatggtgggaagcccttgaaggattttaaacaggaggtggcaggggcacacttgattgatcacacaggaagcagatgcttagtaatgtttgtggagttaatgttgttaccagggagacaaaggcagagtggctacaactgtggcatcattctcagtggtcccctgtagaccaaacatgtgacactgtgggagatgatgcttagagccctaagttatgtttggatcagcaccctggagagaggtcacccgttccttccttcccctgtctgaatgtgggaaatttaagatatatgttgatgcatatgctgtcttatagggtcaagcctttggggctgtgaggggtgccactcagtgtgttcaaggagaaggattgttgtaatgaggaaaatactgattctgcatgaaaggattttaatcaactgccctgatacctgagggacacagtacttggctggagtgctgaattgtgcaccatccagcccttgcttccagcctgctggcttcctgcttgggtgcctctgtctaggaagacctgcagcagctgtccatcctgggagtattcctgtctatgcttacgtggcacatgtcaggtaacagagcatgttatctcctttgaccctcacaacaacctgtgttacagggatttttatccccattttacaggtggggaactgtgaacctcagaaaagtcaagtgcctttccaggtcatacagctagtagacacgggattcaggccccagcgctctacaggcaaggagaaatccaaagctaataagcccccattactattttaacttagagctatgcctgttgtggtaggagttaagcctccctgtcatacaggttgggagatgagaacaggatgcactaccacggcacagccttctgcacccttactcagccacagaatgtaggagttccatcagagataccaaatagtgagcaactgagggcttcttgaaatatcagcccttggggccctgttgcccagcaggggagcccaatctgctctagagggtcctcaaagcacaaggaggccttggtgggaacctttgcttagcgtcctcttccacctaatttctcaagttgtattccttatgagctctggcagctgcattgttccatatgctcatttatttattcattcagcacttaataagtacctactcttgtctttccttttatgttcaaggcacatttccaaatactagagttttggtgagacacttgaagagactttatcgcatccaccgtgatagtatttttttccttgatcacagttcagctctaggttaatattccattagaactgaccaccttctcttttatactcacatggaaaagttattgcaggttccaacaacaacaataataattgaggttgagcatccgtaagttgaaaatccaaaattctccaaaattggaaactttctgagtgccaacatcacattcaaaggaaacgctcattggagcatttcagattagggatgctcagccagttaagtatctgcagatattccaaaatctataatctgaaatgcttcttgtcccaagcatttggataaggaatacttaacctgtagcagcaggagctaatatattcgcatgctttctgatgtgctggacactattctgaatgcttacatgaattattttatcctctaacaaccctagagatatgtattgctatttccatcttacaggtaagatagacacttcccaaaaggtcatgtcagccagttcagtaacagagtgaaggcatttggtttcaggtatctcctgacgacattccatgtcctgtcacacaggagtaaggattcaggctttggctcctgcttgatgtcaagccatgtatttaactcctacacacagcaagctttacctctctgtatactgtgtcatatgacccactcagctctgagttatgctgaaagaaaacactacataagctcaaagcaaaaagcagttttgtacactgatgaaaatttgacgacgcacatggaagattgaaggtgcactaattgtgcctttgagcactggttaagagctactcaatttgcccagtcatagtcttaggtaagtacagtagcattcaggaatgaatctggtgtccattcctctcagctccctagatggagagagaagactggtttgtaaacagccatgataaaagacagaaaatgagaaaaccttttcttctccctttgaccttcctggctggtttcctggtgtttgtcaaagtatggagagagggtctggaataccagactcttcaggaatatacccccaggcttcaggaaagtggttccagccccccattaagcctagattgtcttcccttgcaggatgtagcatgacgtagagcagagaccaagataaagcaccattagaagtgtttggtggcaagtccttagtctccctatccccttctctcttaagagagagacaagaaaaggaaaaaaattggatagttttttgtaaattagtctgacaccaatgtctaaaaacaatcaggctgaaggacttggaaagaaatgaagtaaacttcatgttttctttgctttggtttcatagaagttcacagttgggcaagagtggcttagagctgtgttactcaaagtgaagtttaaaaagcaaaacaaaagaaaaaaactggttcttcaccacaaatagttttgagaagtactgacttatttagttagtgtgacagtgtgaaaaataacctaagtcttttgattatgagattaataatacctgcctcagagtactgttttggggattatttgatggtaaataatattttgagtacttaagattggcctactgctatgcactgtatgtgtattatttaatcttctccacaattctgtagtaagttttctgaaactttggataggttataggacttgccagaggtcaaaggtgtggtaagtaagcaagtaggtagaatttgaatgggagttatgtggcatgttctgtgtaaggagcctgttccacatgagggctcccttgtcactgtactttctctgtatcactaatggtaaagatctgctttctttttctatcactgaccctaacttactttgttaccttgggcaagtccctttctctgagacttaatttttcttatttaccctcaaggatatgccacatgacctaggtttttattccctagatcatgcagcatatcctaggaaccagggactttattcatctctggttccacagcacctagctagataggcctggcatatcctaggaaccagggactttattcatctctggttccacagcacctagctagataggcctggcatataatgagtattcagtactgaggccattggttactctagaggatctgtaaggctccttttactctctactttctctgaacatcctacatactttattctctgccttccccacccttcctcaacatcatattttctacctagttcataggacagcatgaccttatttccttatgtctgcctgtcataagcagtcttgatcctgcatactttcagacagcccacatgatacctatgtttttatttgtctgtgaaatgtgactaggataaaccaccagggataacacaaattaaggggtagaaggggcctgctcacaaaatcagaagaacactcttattccattcctacccagttgggcctgggcctatggcagccctgccaggcctgagtaatggccatagcctggagcagggttttccttgagctccatcggggtttccagtaattggaacatggcaccttccaacttgtaatggatggcaaaacaagaggggcatttgtcactgcctgacttccctgtgggaaagaggctcataagtcacagctgacaaaccctttgatgacttttaaacttcatttacagaacagaatagctataatcaaccaacagcaagcagtgactaatcttgccacattatcagtgtgaggagccaactcttaaggcataggaatggggcgggggccatccccaaagctcacagcaagtgctgattggctcttggacttgagagtatgccttcagctaggccctgtgagtttatgctcaaaggatcagtgttaggaggtagaggaagaaactgacctccaggcagatacagggcatgcccagttttgaagccattctgggccaagattatgagaccagctctggtctcgcacatattcatcctacctctgtcatttcctggcttgagcaagaccagacaccaagctttggtttcatcgtatgtgaaatggtcacaacatgtatcatcactatctcatagcagaaggcttagtgcagttcctgggatgtaagtactccacaagtattgatgatggttatcatgatcacatgtttgggcctggagtaccttttgtggtcacatggtttaaaacctaggtcatatggcatgtcagcaaagccaagaccattcttcctgtggatgggggctcagtgggagcaatctagtggaatgggaataacacaggctttagaatcagacaagcccttgggtctttcggtccaaagcatgcaacttaatgtgactgtagacaaattaagctgtttctgagtctcagttgtatctgtagagtgcagatgatactacatatctcattagattgtgatcaggattacaagagattatgcctgtaaagctttcaactcagtgcctggtataaagttctacatattaaattgtatgttccctttttgttctccctcaaggcaagaataagtatgcatctatccagggaagcaggagacagcagtgaagacattcttgtatttcaaacttctatttccagctctatgtacaggaggaagaggagaataaggggatcaaagaggagaaagggatacattttgtatattgttcctccctcctgccaggcctcttctggtgtcactacccaatgggaattcctcttaaacactctcccttttggtagagccttccgtgctgctcctaccccttctctgatctctcagactactttgcttggggagtagaccatctcagggcacgtgtgccttgtggccatggtagatgtcgcctgctggattgggatttgcttgaggtcccagaccaaccgctggataaataaataaataaatgattggttagttagttatttgataatacctggcccataattagctccgtgtttggatatttataattacaatcagatggataagtctgtgtttggatgacttatttggcaaaaaataaagaggttgacaatcatttgtaggtcttcaattctaactcagtatcggggattataggcataagttacctacccatccctccttaacttgtccccttcctggaactatgaaggggagcttgtcgcagatggtaagcctcagcctaaggccacagacaagagtagagttagtgttcaagatgcagggagggtgggattatatacccagagcatgctatggggagataactgaggcctgccttctgtttctgctttggggtatcctctcagggcccattagatatggataccaatgtcagtagtataggaccgcgcagtacagttgaggggtgagaatgactcagcaaagctggaacccctcttggctggtggttccgtcctctcccagccccattcagtagtggtttgacaggaatggggcagggacacctttgtgaagtttctaggtttggttgcagatactaggacaagggagagcatgcataggctccctactccctacccccaactcccttactctcaggcaaagtgtgatgcacagggagatgacatagtaaagaacataccatcttagggctgggatgtggaggagctagagtgccaggctaggttcatctgttttcatagagcatttgggttatccagtttcttaatacctgctagtcccacccattatactagcactttactcatattatctccagttcttatcctaattctgggaggttggtataatttccgttttgcagttgaggactctgaggcccagcaagtgaaaggatatggccacagttacagtttcaagtgataggtctcggattggaactcagtcctgtcggactctagggcctgagctatttttgctatttcatgtgcatttgtcctttgttactaagaaatcgtttttaaaaaacaggttcccagagagggggcttcttgaaaagcaagtagagcagaagactggtgagcacggtgtttcccagcatctccacagtgccagcacagaggaggacactcaagaaatgtttgttaagtgagtgaaggagataggaagtgggtaataatagaaattggcataatccatattctttgatagtacattacagatgcaacagagcgctttcacatcaattagcctatttgattcttgtatcagacctgaaaggtaatcagggaagagattatttctgttttcggattaaagacaagaaggcctagggaagttaaatgacttgttgcaggtcacatgactaagaacagcagagccaaggccaagccttctggacctgtagcctgcactgcttacacttcacccatccaggagcttttgctgtttgacatgcagggagctgactcatgagagtgggaatggtcaggaactaaagagcattccttgggaaattagtcctgtctggccagtaacaatcatttgggcactgctaatgaaccagggcttggccagtttaatgagattaatagatgttctgtcatccctggccgcctggtaaaagcaggagcctctggaccaaggaggccctggacactgatgagtctaattgcttgactttctccagaaatagtcttcccatcactagtagctgttttccttctgaaccacccggatgtccccagggttatctaagggcagagagctggccacaggctgctgtgaccctcatccccatgcaggagaataaggccagaggggtccagcaggactgaaccaagacagagactataaatagcattgggggcatcaagacctaaagcagcagctcctcccttgaaatgagtatttcaggaggaagagatttagtgctggggaggatttacagagttctctgagtgcctgagactagacttgatctgataggatttggagcacatgaggggtgacatggcagagttttagagtgttaagacagccattgagacagtggaatggagagtgtcgagtaagaagccttgattcaggacccctagctacactcccctcaccagctggttgaccttaagtaagtcacttatctttgctgatcctctttttttttttttttttttcatttataaaatggggcgggatgggtgcagtggcttatgcctgtaatcccagcagtttgggaagcaaaggagggtggatcaggagttcgagaccagcctgactagcatggtgaaaccccgtctctactaaaaatacaaaaattagctggctgtggtggcgggcacctgtagtaccagctactcaggaggctgaggcagaagaattgcttgaacccgggaagcggaggttgcagtgagccaagatcgtgccattgtactccagcctgggcaacagatgtctggtgagagccctcttacagtttcatggacaaccatcttttcactgtgttcgcacatgatagaagacacaaagtagctctctgggcctcttatttgtttattttgtagagatggggtctcatgatgtagcctaggctggtctccaactccaggcctcaaaggatcctcccatcttggcttcccaaagtgctgggattacttgcgtgagccacttcctggcctggggctctttttttttttaaaggtattaaactcattcttgaggtctttcccttccctttgggacctcatcactcccaaagccccacttcctaataccatcacattagggattaggtttcaacacacagatttggtggaggaggcacattcataccataagagatataaactggctttgttcactaaaattctgtacaactgtgaggaattgtagtagaaaagggaaagggtgaggaccaaggagagcgtgtgtggctgactcaaggtaacataatcttgccagggaagtcagaacccaaggcatccctgtgccatgtgcaatcttgcccctgcaggtgcctgtttttgaggtcctgattccagttctggctttgctctattaaccagttaccttgcttctctgaacctatctcagtttccctatgtcaaacacctcctcacagggctgttgtgagggttaaatactgtaatactgtgcagcattcagtaattagtggccgtccttttctttttttctttttttgacggaaagtctcgctctgtcgcctaggctggagtgcagtggcggtgatcaaacagttctcctgcctcagcctcccaagtagctgggattacagacatctgccaccatgcccggctaatttttttttttttaaagtagagacggggtttcaccatgttagctaggctggtcctgaactcctaacctcaagtgatccacctgccttggcctcccaaagtgctgggattatgggcgtgagccactgtgcccagccagtggctgttgttactgtgacggctctctgggtgtctcatttacccaaagatcagaggtaccttttagggcttttctacctttgcaaacccctgccacttttctccatgttcaggcttgttttttgttgaatttgtttttgccacatttcttctactcttactagcctggagaagcaggcccatccctttgagccgtaaattgcatttcaaagcctgtttcactagtggattttaattagcttaaaaggcccagcttttatgcagcaattgtttctcctgcaggtaaaggtgaaggcacttattggggagccagtccccagttttctcaaacgtagcttttttcttttttcttttttttttttttttgagacactgtgctctctcccagctcctcagtgtcctgggggcctgtctcttaccagccccaaatgaaaaatggaatataaggaccctagacttagcgtcagaagacccatggggtaatcttgtctctgctactcactagctgtagcatcctggccaagtttttactgtgggtaaaacttctcttctgttcttccgagtaagagcatttataagctccatgtgcacacaggtctctgctcatctgacattgcagaagtctctaggaataaatttgcttctctcctttcccccagccaccaagaacaatccttctacccacctctcctcagctcattgctaaacctaggacccctgggggctgcagacaccttgctctcaattacacagctaatctgtgaggcagagcttggcccagggcaggaaatagcttaccaagtgaagtagctcctgctgaatggatgtcaatattttctagggctgccactctaagctagggggtaccttgaaaagcataggaagaattgggtgggagggattgagttggtctgtggaagtgggtgtttggttgaaagattagaaaatggtatctgggacctctgccctagtggtcctaaccacttaaggcagcccacagctagaccttctgaccacctcctgggacatatgtttaaccactccctccctaacattgattgaacacttactgtgccccgagttttgtcaggcctgccctataacatttgcagggcagagtaataagagtacaaatagagacccatgtaccatatgtttaaacatttgaaggttctgaatgaagctaataaattgtgatgttcccaacaacctggaataccatgtcttaatttagaattcttggactcattaggattctgtacttgaacctggcagttcagggagacctagcctggctctacctccttttcattccctttcccacctctatccctcacttagaggagcctcatcaacatgtgtgtggtcactcaagcctttgcacacccccacagatacctgtctccttgggctgagggagtccacacaactgtagcacatcccactttccaaaggagtgtacagggcatgaaagtggatagggggctgtttagacgaggagctcaagaggttgggtacctagcgcatgccataggtgagcatttctccttttaactgcagatttctcacccagagcagcatttgcaaccacatacatacacttcccaagtctctcctctacagatcagaaaactgatcttcatatgccatggcttctggctgcccctccttggcattatacagaatgtgttccactgtgacctttaccctcatctagaatggggttcgcagatggcagtattggaataaagaggtgcaagccagtgtaattacaagatcttgtgaagggctttagggtttgcaaagtccttttatgtacatcattccaaaccccaaggaatgagagaaaagactggcagggccaaaccttaaaaacttggctcaccagtcaaggtgagtcctgatctcgtcacaataccacgaacagctgttcagcaaatgcttcctgctcagtggtgcttgtggctcccagtagaggtcactctttgtatctctatccacaccccaggcttggttgactccctctagccaaagcaggtggcttctccctaggccaaaactatagcactttgagctgaaccacctaggagagaatcatctgatgcccacacaggggccctattaacttcttgtatacccgtggatagacaaggaattaacccttgaatggcttgtcatccatgtaggagagggactgtcagcgagaactgtgaggaatggcaagcccatgggaaaaacatgtattgagcatttcctgcctcgtatgcacagtgtgttactacctttgtgtccctcactgcctgataagtgtagatgagtggaaccaaaggcaaactgagtaacaagagtctgtctctttccaagtcagttccaaagctggcaccagccccttcatcagtagcagtgatgggaccctctcagcccctttcctttatctgagataatgcactgctgactctagtatatccattgggttcactttaagcctaaccctgggagcagtttcttcccaagttgggctcacgtccagcctatgattcccttgtaaacagtaccacctgctggtcagaacgtgccagcttccaggctgggaggatttaagagaaaaagagtctcttatcccctagtgggataagagatacagatgtatcttttccagttcactgaaaagaagtccccccaaaatattaggtaaataggttggcagactgatgaaagtttttatatatgctatttggagtcttttatcacctgaaatggccttaaggttaggttactgagataggagggttccaaaagggagtggcatcaacctgtaccaatgagcagaagactgggccgggaactgccaaggcttaacttgaggcttttcctactgaaattgagcttctctcctttcccctttcctcttggagcctatgcccagccgtaaactgtacgggaaaaatttgtacagccctttggggtaaaagacctggccagaatatagagagcaaagggtaggtgcagtctcatctctaagccaaacagaacaaaatttgaacgagttagtattaatatgggtaactaaaaaataaatttattaaaaataattctcaggtgaatgtgctgactttctgtggtatctaaattggctttagctctgggaagcaaaatgataaagttgaaagaaatagactttagtgacagactgacctgtgttcgaatgctcattactagtaagttaatgaacttgtcaatcagtttctggtaaaatatgagtaatcatgacattaacttgtgggatcttgggattattcagtattgtataccacccttagccacagcgagtgcctggtgaggctttgtgttagtccattcttgcactgttataaagaaatacctgagactgggtaatttataatgaaaagtttaattggttcacagttctgcaggccgtacaggcttctgcttcttgggaggcctcaggaaatttacaatcatagtggaaggcgacggggaagtagacacgtcttcatatggccagggcaggaggaaaagagacagtgggaggtgctacacacgtctaaacaccagatctcacgagcagtcactcactatcatgagagcagcaccaagggggaaatgcatgatttcagtcaccatgatccagtcacctcccaccaggccccacctccagcactggggattacaattagacatgagatttgggcggggacacaaattcaaaccattatcgggcttagctagcatacccttttcaaaatggttggtagcaattcagacaggtctgtgtctggatcagactaagcagttttcttttcttttcttttttttttttagacagagtctggctctgtcgcccaggctggagtgcagtggcttactgcaacctccacctcctgggttcaagcaattttcctgcctcagcctcccgagtagctgggattacaggtacccgccaccacgcctggctaattttttgtatttttagtagagacggggtttcgccatgttggccaggctggtttcgaactcctgaccttaggtgatgcacccgtctcggcctccaaagtgctgggattacagttgtgagccaccatgcccggcccctgcaattttcatcatatggtggtggtctagagtaaacatcacttgcaaataccatgtgaccatggttctacattgaagatcttcaaatttagatcctgaatgggataacatttgagatgagcattaaaggagtagactcaaaagaattagagtcaagcagatcagggggtcagatcccagccctgccattcactaacattgtggtctctctgaatgtgagatttctcccttgtaaaatgttgtggttctgcatatcatgtgagtaacaaatgagggaatgtatgtaaagcacctggcatgaggtcagcagccaatatgtggcaactcttggtaatatgacaagaaaacaagatgcaggaacaggtaggctggatgctataagggttaaggaaggtaagaggcaattcatttatccaggatatgggccgtgggcagtccttgagcccagcccagggacccagcttcaccgaggctctttttcttcaggtgggcaccatgtccttgaagcttcaggcaagcaatgtaaccaacaagaatgaccccaagtccatcaactctcgagtcttcattggaaacctcaacacagctctggtgaagaaatcagatgtggagaccatcttctctaagtatggccgtgtggccggctgttctgtgcacaagggctatgcctttgttcagtactccaatgagcgccatgcccgggcagctgtgctgggagagaatgggcgggtgctggccgggcagaccctgggtaagcctctcttcactatattctcctagtattctctagaatagctgctatcactatccagttctcaacccccttctctctttctctcaccgctaccactgctctgagattttataaatttataagctatgtttaagttttaaatagttataaaattaatccctatagggaagaattttagaagcctctggaaaacacttctgacctgtctctgctttctcagagcttcttagtgacaggctttacagttccagttaaaatgcagattctccagagaaagagaacagagtggcctagaacagcctgttacaccgggtacagatgacttaggttagaaccctttctgagagcgagcaggagggcctgagagcacaaggacagtgtgaatacgcttggttttggtgtcatgtccatgtgatatgactatgctagtggtctctcttgaagtatgtacagtgttcatgcatgtgcatttactcctgtgtatatgtgtatgtttgaaaaggggtatctgtatgtgttttttcctgaacaagaagtatatggattgactgaacatgtggagatatgtggacacaacccttgtatgtatagatgtagtgtgtgtgtgtgtgtgtgtgtgtgtgtgtgagagagagaacatatttgaatgtgtcagcagatatacatatattcatttaccaggtatttattgagaccttttcatgtagtaaggactattctaggcatgaaggtgtttggtagaacatccatgtgaatgtgcattggctcatttgcatgtgggtagttgtctatactgagtgtacttgagaatacacgttacctgtgtgtgagtttcttacctggatatgtgaatgtatgtgtgagtgtggctctgtgtatgcgttcccatgtacctgatgtgttacgcatttacatgagtgtatttgagaatgcatataggaatattcgacgtgtgtgtgtggtggggcgggggggaggacatgtttatgagcatgcctggatggatctgaaagtgtatggacatataaacaggcatatccatgtgatacctggatatgaatctaatgtttgaagattagatgtatgaagacctttgttggcaccatcagtgagcagaatccatgtgtataccgtgtaagcacatgaattgctgtgcgtgtgcatgaggttgatgtgtgtgggcacactgtcatgttagcattccaactctgccttctccctccacacagacatcaacatggctggagagcctaagcctgacagacccaaggggctaaagagagcagcatctgccatatacaggtggggctgtctgactgtctgtctgtctggtgggatgactctctctttccacagagggagtaaatgctggtgtgacagtgtgctgaatctagaacttggggaggtgtctggagatgagggcctgtggaaagtgggctgagtggccgtccctaagctccagccctctcccctttgtttccccagtggctacatctttgactatgattactaccgggacgacttctacgacaggtgagcaggggaggggcgtgcccaggcatgaaacagccaagctggaagggtcttgagagattgttggtgcagcccactgagttctccaaatgagaaccaaaacccagaggtttgcctggggttgctccaccagtcggtagcagagctgagactggggtcctgtgctgcaggtgctcaggccagagctcctaccaccatacaacactgtctgccatgctaactgccctttttccttcttgtccttgggtgaggctcaaggagaccgtacagccaagagctatgtaagtgtggctagttggaatacacaacagggtacagcgctggttgcagggagtttgagcccttccctctgtgaggtgcccaagcagctggtaggagccccagagctcagtctaagcttcttgggtttatatttagagacaagaggccagcagccatttggaagtctaattagtccctggcgggctgtggtctaccctgcactcccaagccctacccagactccagcccagaggctgtgggctcccactacaacagcactagccacattcttgagtagaaatcatggtagatactaactcaaatctctcctcctccctgcttctctccctctgtccagcttagcccaccccaggcagcccaagaagaacagtgcctctctgagcatgagtcgtccgcccccatccccaccccgcccctgtgagtcgtttcaggagacagtgtggtgtagtggaaagtgtcttagcctgggggtcagaagatttagatgctaatctcagctctgccactgaatggattatgtgatcttgggcaaattcccttcccagtttgtgaaatgggcttgcaccaagtgatctctccaggctcctccagctctgggattctgtggttcagtgattctgaccaaggccagagccgttccctccccttgggggcagaaatgcagggtctgggatcggatccattcccagagactctccatctgcagccatcaccacctccaggaaggggctccctgaacaaaggagccccaaggaatggggcttttgcccagtgatggcaggtttcctggccgttgtcaggaaaattgacccaaagtttaccccctgggctgcgattccctgaaaaaggtggcagcaacagatgtcagagagaccacttctcagcctactgagtttctgcctggtcagctggaaaggaagccctcctagagagggcttggagatgactttggttgggggcagtgcacagcctgggagccctgggggggtctgattgagctgcccaaccttgatactctaccaagcccctggcctttgtctctggaatggagcacgaaggatgtggtgattaaggaggtcaagtaaggaaagggcttagagttcagtcttatgcctctgaggtcatgggttcgtgaattgagggtctcagtaccctgacctttcatctattacacgttctaaagtgtgtttttaaccgaattctttcatgctgtgcccttgggtggacactgaatgtggatagccatcctcatttggcatatggggaaactgaggctcaggtaggctcagttgacccccactcccatacctctctattcctagctggggatttgtgctgctttgagatttgcaaactctgagcagaggttggggtggcagttgaccaagcagaagccaggtcatgtaatagagcaggcctgggtgccaggggacctagggatgtctcctcttttgaatggggtataactgctaccacctgatgccttgcctgcccttactgggcctggatggttggagaggttgtagtgaggtagtgaggatcccaacagccatcagggtccggcaagcccttcctcttcactccagggcttgctaggagccagcagaggtgtgtagtgcaggcctcccagcccctcaccagccacacacgtttgtagccggagctgcaataccgccctggtggccacaagccatgctgcagcctctggcccatctgccctcacaggctcttcgactaccggggccgtctgtcgcccgtgccagtgcccagggcggtccctgtgaagcgaccccgggtcacagtccctttggtccggcgtgtcaaaactaacgtacctgtcaagctctttgcccgctccacagctgtcaccaccagctcagccaagatcaagtgtgagtgactgtatcatattcctaagtaatttgcatttttatcattagcaaaataatagaatcacattttttacattggaacatagataaaacaacaagtcttccacagttctgctgctctaacacagccaagtattttcatgcatttctaagaggaaacagctgatgttttaggaggaggggttgtgttgggcacagagagtccagtgctggatatggtgcccagtgaagaaatggtgccatctttcctctagtaaggataaggacaggtctacccaggcccattactccacattcactctggtacacacatgctgcttaactaatcacccaggaattcagattccaaaagacacatgttcttgctcaggtgcacacagaagagcacaccacacatacacacctgtgctcctgtctgtctttggtccctttcagagttgagagatcaggagaaaagatagccaggttcagaagtgtgtgctgtcactgtagggatggacgccaggtagtctaaggaggagacctttttcctaagcagggaaaaaacaaaacaaaacaaaaaataactgctttcctggttgaaagaacagggctgaggttttgtgctagtgtcaagcctccagccccctaggtgacagccctgtcccccctccactcccagtaaagagcagtgagctgcaggccatcaagacggagctgacacagatcaagtccaatatcgatgccctgctgagccgcttggagcagatcgctgcggagcaaaaggccaatccaggtcagcctctgaggattctcacccacctccatgaccagggcacagggcagagcatggggaaatagtacatgggagagaggagctagggtggccctgcagatcctggaccacctgcactcaccatgctgaggccagcttccgctaaggtgctgccctagacagctaccccaggctgagttttattctcccctcctccaccccttcccctcaagatggcaagaagaagggtgatggaggtggcgccggcggcggcggcggtggtggtggcagcggtggcggtggcagtggtggtggcggtggcggtggcagcagccggccaccagccccccaagagaacacaacttctgaggcaggcctgccccagggggaagcacggacccgagacgacggcgatgaggaagggctcctgacacacagcgaggaagagctggtgagggcctggccaggggcacgactgggactcgactgtgctcctactctcaggaggccaacaggggaatgggcagcctgagctggttgcccccactgtgaacttcctgttctctccttcccaggggttctggtcctgggggaaagagggaagaatgagcagggggcacttgcctatctcagacaccatcagaagtcccactgaggcctagggcagacctcccccaaatgcgggcacattctggcctccggtttccacatgagttggagaatgggagattcggacataagggagcacacacggcctgcagagcttcagagcagggctggggtggcttgtggaggccacagccaggaggtgggtttttctaaaagccattgctgcttaagcatgaagcaaaagctgtctcataagggggtgagctccccgcctgttactagaactattcaggctgaggccggcaggccatttgacaaggagcttatgttgagtgggagggtggaccaaactctgagtctgtgggatatgggttgtacacttgctgctcatttacttaatgagcgctcattgagcaccaagacccagatcatactctctaacttcacataaccttaacaagagccctgtactatgcagagtattctgttcccacattttaccctgtgaggaaatcgaggctcagaaaggctgagtggcatgctcagggcatcagctcgtagggactgagccagggttggagtccagactgacttgctggatctgcagctttctccttttcagcactgctgggttctatcgtgagaacagatgggctcatggccatgacggttaggaggtctgccttatgctagctcatctctcctttgagcgtagcctgatccttcatcttattttctcaggcatagcagtgtccataaaggccctaacaaagacttggatgcccccagagatggggagctcaccagtctataaggctttcagccttctccagtgcaggctctctgcacagaaatggggctcctgccactcccagaacacccttcactggcctgtgtggggtcctcagaccacccttccaagttcccaagccagctttgttggctggtcccatagtcattccccttggctgttcctgcgtcttctgactgtgtcctctagatgccctctggaccatgaagtttttctggacaaatggctcagggcaggactcagagctggcaatgagtgatgtgtggtctctcttacctcctccctatcaggaacacagccaggacacagacgcggatgatggggccttgcagtaagcaggtacaggggtcctgtcctgatgggcagagggtggggaatcagtgaagtggaggttgtgccttttccctggattgggcaggaagtgtcacgaagcatacctggccaagtagcactgactatacccaagaatgaagtcccctccatatctagccatcccgtcacaccccttcatgcttggggcttgccatgctgaggaagcaggtgccgtagatgggccaggcgggcccacctagcaagggttccttccctcagcacactcagccatgttgcctgtctctgcccttgaggagctcctagtctggtagaggaagacataagccattaccacctagtgtgagcaggataacaatagagcgaggccaggtcatggaagagatgatgtgtagctgagcctgctagtgattgagggagcaatgttccacaccaggggaatggccttagccatacagagctgtgacagtccttggtatgtggtgaggccaagagcctcctgtggctgcagtgcccccctagttggtagaggactctgcttattgtcagagggtgatgattgtgaagggccgtatgtgtcaggcttaggggctgggatttgattctttcatggggaggaaatgccctgtgtgacaggagctgcacctgctttctctgagttcatcttcaatcccacaagctgatgattgtaccaatataatagatgtggaaacagacactaaagggtgcagggagataaggtagtagttggtggagcctggatttcagcccagtggtgtgtggcttcaaagcccactctctggccactgtttaccatctactctgccctaccttaaaggaaagccaggccacacctggctgtgcctactactctctgacccattcccttggggtggcttgggtggaggaaggtctcaaacactagtgtttccagggaggtgtctggatagatgacacatttatgctgtagtaagatatcccaccagcaaaggcttccagaagagctttagaaaattgtacatatgcagtcttcttttggaacttcttggtttgttttgcctgggatgcaaacaaacctccatatccagccatcctgctacacccctttgtgcctggtgctttccaaagcttgttaaaatagttcacaggtgagttatatgggctcaggtgaggaaatggaggttcagagagcgggtgagacttgcccaaggttacatggccaggaaattatgaggccacagccagagtgcaagaatctctctgtctccagacatcattccaccctttcttccctaccccttttatcagcaacagggtctcttcctctcagccttagtctcttctttctctctctctctttctcagcctgacaggagcaatggccaccagcaggtgaagggcatcgctgccccaggcctcaagccgggcacccaaccctggatgccaccccccagcgggtaccagaggaaagctggcagcaggcgcctcctcccccaacgcatcccagccagtgccatgtcctctgcaggtggagttactggcctactccttccccatgagccctccctgtctgcactgcccaggccagagggtagagcacaggggtttccccatactacctcccctccccaggacactcccaggcttgggttttttctataggtttggcggggggccacagggaggggaccctgacaataaagagattggatcccaacctgttctgagatgggatggtttgtgttttctcatgaagatatcccggcccctctgccaaccaaaaagctggtctagggtgcctaatactgatccatctggaccttagtgtcctcagtggtgattaaaatggccagtggggccactggggagggttggatatgctggcccatgagcatcttgctggctgaagtgtcaagcagttgtgacccacttggtttaccccatagtaggtcaagaccttatctctttccccagcttctaagtctggtctttcccagctcttaaaaggattctagagtctgccagtctctaccttctctcttctggcttaggacactataattttttcatttggacgttgtcctcccaccagcctcccagtcttctgcctctgccctgtaccatctcccagcagccacgcagtctttctgaaacgtatcccttccctgcctaaaatccctttactgactcttcatcatcaggacaaaaccctacctcctgaatgtagggtgtaagatcctgcttactccagcctctcctgtttcttgtcaccacccctttcctgcccctgacacaaaccctacatctcagtctcacaaaacacacaagttcttcacactccgggcaggtttggtagcaaggaatagagcgtactccagtgacagcaatcagtaggaagtttgcatccggagacacgcagcctgtctgcccctgtcttgggccacccgtctagacatttgttctctaacaatcagccgggttccttcaaacgtgtgctgcttatacatgctcattgtgtactgctaatgtcacctacttcccccttcattccccacaatgaatggatccattttccccatgttcaagttcccaagagagaatcgactgccactgtaattttttttcctaatcactcataggttacaagtacctaccctggtccagtgaactgcgggattcatatgtggccacttaggctggtctcgttggtatggagctgtgggagggcagcacccagaaataggctttgttccaggcctggcacgtactcctcctgctcctactttctctacctgggaaatagccgctcaggacgaagctgctgctgtggtgtcgccacctctgagaagtctcccagaccctccgactgctctttaattgcctgttctctcctctggaagccttcccccaacacagaaaaattcaatcccatcatcaaaaagggctttaggttttccctccatctttacgtgttgatcaaagtttgcagatctgctggaatccttattgaaaactccccatttcaaaccaacccggtctacagcctccagggaagcttcctcctgggctttggctccatgttttggtagagggtggaggctttgggcagtgctcaaactccaccgggaagtctctctcactgagcagccctcctgcctgtcatcctgggcaggcgagcactctgaggccccagtgtagctctgtgctttgatattcccaagctctgctggggcctgactaggccagccccaaggtggccagagttctggcttcatacctgagccaaaagccccaatccatgcttggccattgcctgagtattagctgccccagggggatcacggtccccatatatttgcttgccatggaccctgggcagcagggagagagtagagatttgtcaagagcccatggtggaggctgaggccctgaggccatgagatgcaggcatggggtgagaaacaggccccttggaattgggctgggccttggcccagcttagtcaaatcaaaaggcttctatttggagagctgaagagggtgtacagaggaaggggctaggtctgcaaggagtgcctcatctccctgaagagctctcagtggaacatacttcacccatccatgtacccacatctttccttgcccagaaggcgagagccagctataacagacccatttcaataccctggcaagtcattactgcccttagctcttggtgtccccatctgtgaaacatgggggacagctgctagcctggattggaacttgggcaaagtccaaagaatgggatttagagctgaatgaacctcacactgagggcacaatagcactaggcactgcccccagagcctagtgctatatgcctgctgcaggtcctacccaagcatgctttactgaggaactcaacgtttcagagcttgagggtcaggttgatcatgggcttgtgaccataggcttccttagtatgccaggcttggagaaccgtgagaaaagcagggaagataccttcaagggtagcaggcatcagctctactcaccttggcccataaggctttgcctggtcatgctggcaccgggtcatatgctggacagggagaacgagagtcccatcctggaactccagaaaagcccctggatgctccagcccctgggaaagcacacagccaggcccttgggtgggaggttggcttctaacagtgcatacacatgcccttcctctgagtcggggcagcaaaaacatccattccgctgcgcaacagttgtcatttttctaacatctgaaaactccagaaggagatggtgataaatgtggtaccggattctgcctaaaggatcagtctttagatgttttcagattgaaagcctcatttgtgatcctcacagccatcttgaaagaatagagcagccagtgggtatactggattgtgagctaagaggcctgggactttccccctgttgctgccagccaggttgatgaccctgggcaagtctttttccttaccaggtctcagtttcctcagctgtaaaatgagaggttgatctggatcagggatagtaaatgggcctttgttcagttactgactgttgtataacaaaccacccccaaatttagtagccttaataaacatttattagctcctgagtgagtggcttggcagtttgggctgtgttcagtgtggtggttcttatctcatctgggccctcgtgtggctgaagtgagctggcagatcagctggggactggctggtctcagatggcctcgcccgcctgtcaggtggttggctgggcaactgggccacacgttccagcatctagcaggctgacccaggattctagacatcatggctgagttccaaaaaccgcaagagaagacaagcccagtatgcgagtgctcttgaggatattgctatgacgtatcttttggccaaagtaagtcacatggctaagcccaaattcttcttaacaggaggagcttcaaaatatggccatatttaaaaaatctacctcaggactcatttcacttgccaactcagaacttttagtagcagctgcctggagtgccttttgaggatctgcagcaattttcagactgtttggaaatactgacatgatagtttggcagtttctcttatgagcatggaattcaagtgtgggcacgtgagcgtcaggtatttgccatccctggccaggttgacccgtaaggtcataacctgccccataggatgttatatgcagtaggcctgtctgacaagaccacagaaatagagaaggcaaagcagagcaaaagattctgagccaggcatccttggttttcatcccaaccagatcattgattgattgaggttttaggcaaatcaaaatccctccaccagtagccagattcttcataataaacttcctccataacagtaaaccatttcctgaacacctgctgttaaaaagcacattttacatttacttaatctccacaaccaccctcagtaggtgtagtaaggacttctggttacaagttacagaaactgaattcagtcctgcttagtgggaggaagtttattggctcacaaattgtaaagtccagggatcttcagacatggggacttgggttcaaaagctgccatcgagaatccggttagccaggcatggtgacacgtgcctgtagtccccgctacttgggggactacagtgggagatcatttgcacctaggaggttaatgctgcggtgagccatgatcctgccgctgcactccagcctgggtgacaaagcgagaccccaactcaaggggaaaaaatctggttttcgggcaggttccaagaagtggtagagcatggccatagggcctgtgagaatagagggacagaggggagaatccccaaaaggagagcaaggcttggctaacaaaaacaggcatccactgtgtggttatgtctattctatagattttgtagatgaggtttaaaagcatggccccaagtaaaggtggcatctctatcctatcctcgcctttatctaaactctgtgaccgatcaatagcatatgatggtggtggtgctctgccagtctcccagtcccagactgaagcactagcagcttccacttattatctcttgggactctagctcttgggacccaaccaccatgctgtgaagcagcccaggccacacagagaggccacgtgtacatgttcagctgacagcagtatcaaatgtcagacatgagagaggaaggcttcaagatgactccagcccagccaccgtctgagaacaaagtaagaactgcctcactgatgccattcaaagcccagcaccatgagagataataaaacgttgtttgaagatgctaacttttggagtgatttgttgtatcagtagataaccaggacacaggcccacagaggttcagtagcttgctgtgcttctcagggggctaggttaagagtataggttttgttgctgggcgcggtggctcacgcctgtaatcccaacactttgggaggccaaggcgggcagatcacgaggtcaggagaccgagaccatcctggctaacacggcgaaaccccgtctctactaaaaatacaaaaaaattagccgggtgtggtggcgggcgcttgtagtcccagctacttgggaggctgaggcaggagaatggtgtgaagctgggaggtggagcttgcagtgagccaagatcgcgccactgcactccagcctgggcgacagagcaagactccgtctcttgctgactcttacccatatgcctgcatctgtctaccctcttttctatgtacttgctccctggatgacttcatccgtggcttcagactccactcatggctccataatcttcacctctaactcattttcctcccaagaacaccaggggagtaggtacagatgcccatctaataactgtacttcgatgtccacaaggacctgtccagcccccacttgcccgtgtcaacctcctccactgctccattaatttttccctctgtgttaatttttccctggttatcttaggtcctttctgtgtcttaattggacttttgcagtaacctctaactaggctccctgctgctcttcctactcggctatccgttttatcaccatcccattgggtaagatccacaccccttagcatgacatcctaagatgtccaagatatgactgaccccttctcaacacctcccctcccgtaatctgcctcctccatgtctcaagccacgtggaataaattgtggaaagacctgtgctgtctggcttgtgcctttacacatgctgttatctctacctcaaatgctgtcttcccccactggctaacccttgttatcctttataacagctcagaagttgcctgctcaaagacactttcttggcctgaattagaactgccctctcacgtgctacttccatcacagatcttaccatctattatattattacatacacacacacacacacacacacacataaaatgtattttgagatcagggtctcacccaggttggaatgcagtggcacaatctctcggctcactgcaacctctgtctcccaggctcaagcagtcctcccaccccagcctcctgagtagctgagacaacaggcatgtgccaccatacctgcctaatttttttgtatttttggtacagatggggtttcaccatgttgcccaggctggtcttgaattcctgagctcaggaaattctgatcctgaaattccagcccaataaaaggaaaatagttctatgtgccaggcaggcctgggttaaacatactatcttaccattacctctttaaagtggacattttcccactttacagctgagaatacaggataataatcagtggcatttggggactgccaatgtggactgttcaaagaccatgctcagcattatcaagaatgagcaagcacttgccattagggtactgacttaacaaactatggcataatgtggatggactcttaagtagtcttttaaaattatgaagcctgtaataacttggaaaaatggtctggatactaaaaagttatatggtggtaggattatgggaatttaacattttaaattataatctcatcttcccaattaaaaaagaccacctcacctgctacaaagcccagcttctaagaacacattgcaaaatttaacgttctgttcaattgcgaagcctcagtattgtcagggcaaagatccggaaggggagcccaggtgcggagctgggacctcacataccacagcagcacttcttccagactgtctggcccagcactttttctgcagaacctatcctatgtttgtcaggtggggggagaggtgtgcaaaattctgcatattttatactccctttaaagaaacacattcaaatacgtatcacctacaactttctaggcattgcctgctgtcagtattggggatacatgagtgaacaaaagtgtctgccctcaacacttaacattatggtgtgctggagaaaccatctttatagtgggcagggacccaaggaagtgtgggagtgagccaggtagacacctcgggaaaagcttttcaaactttcctgtaggtgggagtgaggggcatggaatcaaggttttctaaaaagtagagctgcaactgcatgtcttctatatgctgatgaaaatgcacagcactggccaggcacggtggctcacgcctgtaatcccagcactttgagaagccaaggcgggcagattgcttgaggtcaggagtttgagaccagcccggccaacatggtgaaaccccgtctccattaaaaaacacaaaaaattagctggtaaggtggcgggtgcctgtaatcttggctattcgggaggctgaggcaggagaatcacttgaacccaggaggcggaggttgcagtgacccgagatcttgccactgcactccagcctgggtgacaaagtgagactccatctcaaaaaacaaaagaaaatgcacatcaccatattaaagacttgtcaggcagttatgaaacccacttacttactcttgactttttttttctttgagacagacttgttctgttgcccaggctggagtgcagtggcagggtctcgcctcactgcaacctccgcctcctgggttcaagcaattctcccgcctcagcctcccaagtagctgagattataggcgccagccaccatgcccaactaatttttttttttttttttttagtagagacagggtttcaccatgttggccaggctggtcgtgaactgctgaccttgtgatccgcccacctcggcctccccaccacgcccagcctactctgacttttctttaccatggaacccccctccttttccttttcataattaggaagggtcctcaacgttgtttcctaagacactttggaaatgatgatctggttcccttccaaaactagaaaggggctcttgattgcctttgctttgtcaccacattgcaaggttccttcagctgagctgtgtttggtgagagacagtagagacagaagaggttgatgctactgtgtctgagtaacatagggcaacccattatttttcatgggttttcaatccaatttagtcagttatctcaactggactcttacaggggctgcatcagtcctgagaatctgcttcaagaatgaagttaaaaacgggttgaaatcaccagtctatttgtcaacctgtcaccaaactgaagagtatcattccttctcctaaagggtcccgctaagtaaagaataacccaaacacacatacatacacaaaagcaatggagcgttaattacataagaggcactgatccttgctttattcatgtagaaatatccaacattgggaatcgtgtgggtgtagatacaaaaaaaggaaaatgggggcataaacagcagttgggttcatcgtggcagttggtggcagtttcagccagtgtgtgggttgagggccctctactgctttacccatcaccctccactgttttagccaaggtgtttgacaacacttggcctgtactttaagggtcacagtgattaaaaacaacacagtcaagacatttgggtctgagtgactgctcctgagctgcttagtacgaagtcgggcaacaagaaagcgaggagcagcgtgtatgcccttatcctcagcaagtgagaacaaggcagatcacagcaccgacacagaagatggccttctcccatgtgccagcggagaatccccttccagccaaatcctcaggaagcagagcaccacacaagcagcatttcttggtttctcatggtcatattcaaaagcgacttttaaatcagaaaatagaaaaagcatttgtggtgggtctttttcaaacccagaacacaagttggctaggaaaacggaaagcttcctctggcatccctgtttggactcctcctcctcttggaggagtttcctgaaccgcacacacatcgcttcctcaccaagagagatgctcaactaggatcttttttagtgtgccagttacaagacacatttacaggctatgtttctaagacctcttagtggccaacgaggaaggagggtacctagcaccttgtattccctcatgtggtaacagctgggggaggacttggcggtgaggtagtagcaaccatccccacatacggaaaagaattcaaatctatggagtcattccctggacactgaaaacaggcaatcctcctaagtctcaaggtcccaccacactcgcgtgggaggccgtgtctactttaactatgtatctcaagagaagcagagaagaaaaatggctgcccagatgaagcgcctgccattgttcagtttctcagtcagagcccggcacacactgttttatatggttggtttcttgctgatttcaccaagcacatttatagaaaagaaaactgaaggacaaaccaaattgaaagaatcactgttataataactttaatttatcttgcattttacagaagtctatgaacgattttaaaaaagcacctccttaccccatatcacgtttctctgacaggtgttaaagtaggcaatgagtatgtcaacagcttgagcatcagcgtcttgcaaggacttcagaccaaccactcgccaaaaatcttggcagcttttttatcttgtttttaatacaacggtatatccactctgatggcaaacctgtccagccacatctccacaacaagctttgcaaaatcagtgattagcaaattagttagctttggcacggagctgtgctcgcttgcccgtgacagcctggaagccggttttgatactggcaacagaacatctagaatgacaagtttcgcactgtaggaaatagagtcgtgtgtccttctgcaggattgtgtccggtgatcggcatgtgtgacaagtgacatattcctctgcaaataaagcaacacacagaattacctggtggctgcagtgaggtagagaagtttctgccttcttaaatacatctacaaagaactccacaagcccaggctgagaatttagctgggcacccagaccagggaagcgcagctattcgaggggtaagaaaacacaagctgtctgctgtggcgcttccggcactaaacatgggctgatactcaatgccccaggatgcaaggaagcctgccagcttgcttattctcgtttctgtctagaggagagccactcaaacatgttgacagacatgccaattttaaataactaggaacaaaagggggccaaggccaggcctgaatcacaggcaagtttctctgacttggccttcagccctacaatcaaccagcagcttcaatcagctgggctttctttaaaaatccaaatccttttctatctatacccctagttagtaggcaagagccacctccctttcactatcattttgtctctgatctttttaaggccagcttttcccagctcactgcaatcaaatggctcttcctctaacactgcagcctcatgagaacatttcagggtgatctaatgaaatgaattatacacttactgatatatcttctcaagacattttctatctgtttctgttggaatcttcctttgattacaagttggttattaccatctatagaaccactatgaaagaaaacaaaaatatctccattattattgttttttcctaaaggaaccaaattccagcacctttaaacttaatgaacttaaaatatattcagtagcataggataaactctaggactggtgctatactacttggtttcccaaaatttatttatttatgagacagggtctcacactctgtcgcccagactggagtgcagtggcgtgatcatggctcactgcaccttcaatctcccaggctcaagcaatcctcccacctaagcctagcaagtagctaggactacaggcactccccactgtgccctgctaattttttttttttggtagagatggaggggtctccctatgttgcccaggctggtctcaaactactggactcaagtgatcctcccactatggcctcccaaactgctgggattacaggtgtaggccaccacacccagcctcaaaatttatttttaattaaatagtttgcgtctaatgatgtacccatactaacatcaaatccaattaaatctccagtgataacaatcagatttataattgattttaagtctaaaacaaactgattccttcattgtatgtgacagtccatccaacaaaggaaaaaatcttttactgcatcataccatgtacaaagcaaggcaaaggagagacctagaaatataaaaacaggaaaggggctacgtttgttttttaaaattctaagcaccaaatattttgattcaggcatggttagaagtatagttgataaaaatatactaaaattgattgtggtagcagttatacatattaagtttaatatgtgatcatactaaaaaccattggggccaggtgtggtggctcacgcctgtaatcccagcactttgggaggctgaggcgagttgatcacctgaggtcaggtgttcgagaccagcctgaccaatatggtggaaccccgtctctactacaaatacaaaaaaattagccaggcgtggtggtgggcgcctatagtcccagctactggggaggctgagacaggagaattgcttgaacctgggaggcagaggttgcagtgagccaagatccacgccactgcactccagcctgggcgacagagcacaactccatctcaaaaaaaaaaaaaaaccccattggattgtatatattatttatatatatttatttttttggggggggggggtccaagggtggaggtttaataggcaaaagagaaagaatagctctgtcttgcgagagagacggacgtccgagtgggactctcctggattatacactttaaatttgtaagctgttatctcaataaagctgtttgaagaaaaaaaaaggatagttgaatcacaagccacaaactgtcaatggtacttaatgataaactgataggaaactgttgacaggcacttttgagaaagcaaagctctaggctagatattatcattcattcaaaattataaatcataaagtgaaacaacaaaattcagtcaagcagggttaaatttcctcctccacagattgtaacccttaatctccaggctacagtgattgcaatgcttgatgtagaaattctttttcattcactgtcaaaataaatggaattttctcgaaaacccatttaacccattgaccataagtttactggccacaacttgttataatagtttatcccacctctaacaaaacctctagattattctaacaatagaaaaaacaatgctagcttttgctccctcattagtttgtgcaagttacaaataacgatggtaacaaatttatatttaaaacatgctgggtgcggtggctcacgcctgtaatcccagcactttgggagaccaaggcaggcggatcacaaggtcaggaaatcgagaccatcctggctaacacggtgaaacctcgtctactaaaaatacaaaaaattagctgggcgtggtggcgggcgcctgtagtcccagctactcaggaggctgaggcaggagaatggcatgaacccgggaagcaggcttgcagtgagccgagactgtgccactgcactccagcctgggtgacagagcgagactccatctcaaaaaaacaaaacaaaacaacaaaacccacaattcttctacaacagagcctacgtatccaccacggtcaagtaaattaccccttaaccccacaccaagtgtagcaaatcccaacagtttaaagagagtaggaagagaacaccttaattatctctgtactgccagtgacgcacaggtgtcaagcctgttaggtgatcaagctgcagggacagatagacctgattgtatctatcttgactgtgccactaactagctatgtgaccaactacaacttcactttactgaacctgtttccgaacgtgaagataggaatattactttctacttcatagaactattgtgaagattaattgagatggcacccaaaaaagcacttggcacaaaagaggtgctcaatatgcattagtcatcattatcatgacctactctacattacttatttttaaagggacattaggcttccagatagtagtcaaactcattggcatggggtccatgagatcttggccttcctgaatgggaatgacttgctcagtgccttcaaaaggtgagccctgaagacaggtaagtacctatttcatcacagatcctggtttcaatggtttctccagtgccactcatcaacttactagctgtatttcttcaacagcctgttaccaatttaggaaaaaaaagtctgactttaagaaaaccaattcctctaaaaatctaatatttgctccataaaaagactcaagagtttcagttagtaacaggaaagtctaaacatggcagttctgtggtcctctggttggtacaccagcaggcctgttcagatgtcaactctgtgccctattcctaagcagccaagctctcccacagaaatgaagtgatttcactcctccactggcctaaaagtttctctaataatcaggtgaacattttctctaagtgtgttacatatccttttcaagaaaggttcttatgaaatgtccagcagtactgtatgtaaatgtatacagtttcttaccttgtacccaattcagccaacaaaaatgcaaggagatgtttgggctgacgatgtaatctaaaaagaaaatcaaaatatataaaccttatctctcatggaaatctcaccaaacttctaaaaaatctgttcattgttttgatctgtgattatttagctattaagtgaatttcactgcaccatttatttaaactttgaaataaagatacagtatatgacaccactttttttattgttaagagacagggtcttgttttattgcccaggctggagtgcagtgatgatcatagctcactgtaacctcaaactcctgagctcaagccatcctcccatctcagcctcccaagtagctaggactacaggtgtgtgccaccatgcctgtctaattctttagtttttgtgtagagatggggtctcactatgttgcccagactggtatggaactcatggtctcaaatgatcctcctgtctcagcttcccaaagtgccaggattacagatgtgaactgagccagatagcacttgtttacacttcaatgcccataagaccatattacattttatgactacatacatgtgcgtaagcatctagaaacaaggatggaaaacatcaacaccgacttcagagaataacaacttcctctgggaaggaaaaaggggccaggaaaagatacaaaggtggccttaattataactataaaaccacctttttcttttgtttttgagactatcataaaatagcataaaaccttctttttaaagaagtaaaaaaatctgaagcaaatgtgtcaaaagttcaacatataccaaacctaggtgatggatacttggatgttatcaaacaggctaataaatatatatgttaatccatatatatttcatgtgtaaaattttcattaaaagaaagtgtatgtctagaagggttccatggtagcacaacagaaaaatggaaacatcttaaatattcaccaactagaggagtggttaaataaatccattcaagggtgtattctacttttagaaatatctcaatatacaaaaaaaaaaaaatgtacatacacatataaaataaaaaacacaaatatagagcaatgccattcaatattttcatttcattttttaaatctatactgtggcactgaacttgttccaacaagcaggtgctaactacaacaatttttaagcttttttccccaaaatgcaataggtgagaactggtaaaaatataataaaataggtaagctcctacattgctagcgggagtatgaactggcacgaccttgctagaaagcaatgtgctaatgtttgccataaaaatatccattccttttaactcagcaatttcatcttgccttaagattctattctgagctactggaaagatacatgtataaagatgttcggtgaagttttgcctctgataataaaaacctgggagcagccacgtccaacttatggaactgttaaaatatgttgtgtagctatttaaaacacttactcagactaatgacatgagtaaaactttcacaatatattgagaaaataggttaaaaaccagtatgatagcaatttatttttaaaatatgtacataaaactggctaaacagaaaaatattaaactatgataagttagctacctcttttttttttttttttttttgacagagtctcacactattgcccaggctgtagtgtgcaatggcacaatctcagctcactgcaacctctgcctcccaggttcaagtgattctcctgcctcagcctcccgagtagcgggattacaggcacgtgccaccacgcctgacttattttttgtattttttagtagagccggggtttcactatgttggccagcctggtctcgaactcctgaccttgtgatccgcccacctcggcctcccaaagtggtgggattacaggcgtgagctactgcgcccagcagttatctacctcttaatggtggactttgcagatgattttccattttctttagcatgtctttatcttctaatttttctacaatgagtatatactactattgtcattagccaaaaaaatctaaactatttaaatatatgtaagtaatgacaacaagtggttatctctgggtggtaaaattttgagtgaatattatctcttttgtgtttaccatattttctacaacaagcatgtagcacttaggaaattaaagaacaaagagtggataaactcagtggtcctaaggaaactgccagaaaacatgcagctgaggagctcagagaaaagccattcccagacagtaacccagggctgactctggcatagaatgtgatggtaattaagaaagatacaatctcatcaattgtgtcctggcaatgatcatccaaggaagaggcacccaaattcaggcactttccctgagctcactgcttgcttggcaggcctatcctagagcaactgatgagcctttccactccctgggctcccaaggctcctgagaactacattgagcctcctcactcttcactacatctagttaggatccatcctcagtgggtcagcatgagttgatttctctcacctctgaatgcactaataaaacaagccctcctgggcaacacagcaagacccacgtttctacaaaaaaaaaaaaaaatttttttaaattggtcgggcatggtggtgtgcacctgtagtctcagctacttaggaggctgaagcaggagaactgctgaagcccaggagattgaggctgcagtgagccatgaccactccactgcattccagcctgggcgacaaagcaagaccgttatctttaataaaataaaacagccctgagacttatgaattgaagaaaatgacaggcttgaacggtgaactccctcaacccctacacctgtgtgttctttccatctataataaagtcgacaataaggacatttaacattcttaaaactgcaatgagaatctggcatttgggatgaaggtactccattaaccaacttacagtttacagatatctgtaaagttgacaaaagaagttttcttggttcctactcggacgacttgtggaggtttcatgacaaatttccttttctccccagcaaccatatctggattcttttccctcatgatgttgaacactcgattcagcagctataaaaataaagtggtattcatgaatacgcttagtaactgcaggggtataaagttcccctttgagtcatgttgcttaacagcaaatacttcacttctgattaaatatacacatgcattactacaagtctgggagctccttgagggcagaggttcatccccaaccagcatttggttcattatagatgctcagcaactccttgtccaaagtgaaatgaatgaacaaccactcattctgttgtttctatggcaaagtacatgatacatggaaaagtaagattcaggaaagcccaaactagcaaactccagactaccctggccctaaattagctaattcaccactgccctcctaattcctagagggctgcatgccctcagcagtccacaaattcaggtggggacagtgagtagtactacaatgactgctgcactctgggcaggctgccccacgggtgcgcaccaggaattgctgtgcactggctgtgtgacctctctgcatctgttccaccatcagtcattacttcaacggccgttccaataagatttatcttgctcttctttgagcactagtgaatagcttagccccttttcacaacagattttgtcttacctcctcgtatgtgtagtctctttctgagcctgcccaagcagggcctgtctgattactgaatgagataccatcatcttttttgttgtcttcatcttctagagctacagataaaaaagattttaagaatgaggggtgggccctactacaatacaaaagtggggtgggtctagagaaatgaagagtttcaaagacatctgtcttcccttccacagctgcattcacaacagccttaagcataaagaaaccaaagctcacaacccttttccttagaaacagggatgttatgactttcaaaaaaggcccttaatagagacctctctaattaggagttgataacatactgaaatgtttcttaatttaacaaatcaaagataaaataatgcattggaataattagaggaaaaagtccaactgttttgagcacttaagaaacatcaacatccataaaactcatctactgacaaaagttctctaaagaccctatagcatttagaaactaataaaactgtaaacacgagtttaaaaaatttttttaattaaaaaatcggggccgggcgctgtggctcacacctgtaatcccagcactttgggaggccgaggcggacggatcacctgaggttgggagttcgagacctgcctgaccaacatggagaaactcccatctctactaaaaatacaaaattagccgagagtggtggcgaatgcctgtaatcccagctactcgggaggctgaggcgggagaatcgcttgaacccggtaggcagagattgtggtgagccaagatcgtgtcattgcacttcagcctgggcgacaagagtgagactccgtctcaaaaaaaaaaaaaaaatccggttatagtaattttcccaagcctgaatcagtatgtttttaatgtaatcacagttaacaaattctttaactgccattatcaagccaaacactgtttcctttcgcttccattatcagtcagtagaaataaggggcaagaaaaaaattttaaaagcaccctccacccccatcaaggagaccagggccaaaggcttgagtaacctctaaatgtgctgctgagtcctcagcattaccttcatctttctctagtatttcatcctcatctgggaacttaacattcttctttttcttctttttattgccaagcataatgtcaaggtcatcctctggttcagttggttcttgaacatcactttcaatcttaagatcctaagaaagtgagatgagtctgaacatttgatactgggactattcttttttatttattttattacattttctgttgagatgaggaggtcttgctttgttgctcaggctagtctcaaactcctggcctcaagagatcctcccgccctggcctcccaaaatgctgggattacaggcatgagccaccacacccagcctgttcttttttaaaaatgacgtgggctgacattattttggcagggaaaaaaatcacatattcaaaattgaagttacagataagaaacgcctgtcagaaatggaccaaactggctcacagagactctgccatttgaactgtgaattcttcaagacacttgtgggatctttccccctcattcatctctttattcttcagccttaggatcttataattattgtccttatttccaaaccaggctactgtcagaatcacggcagaggccaggcgtcttggctcacacctgtaatcccagcactttgggacgtcgaggcaggtggatccctgaggtcaggagttcaagaccagcctggccaacatggtaaaaccccacacctactaaagatacaaaaattagctggatgtggtggcaggcacctgtaatcccagctacttgagaggaatcgcttgaacccaggaagcagaggttgcagtgagttgagatcgtgccaccgcactccagcctgggcaacaagagggaaactctgtctcaaagaaaaaaaaaaaaaagaatcacttgagaaaatttaaaagtttaaatcggattgatgatcttcagcaggaacagggttcaggagtactttaaagaagtttctaagtgattttgatatagtcattgggaaagatttttccgggtgacaccaaatatgtgtttttccacaccaaccctccaatgccagttaggtgtcctccagtttatttcagacacacactatccagagttatcatcagatttcacaggtttaagggctcagttcctcaagactgccttcacttcagatgccagtcaccacgtattgggttcccatgctgcctgcttctgtccaacatggctataaactcggaagttcccacattcgccatcaagagtcaataatttgccaaaacgactcatagaactcaggaaagtacttactactgccaatttattataaaggatacaactcacaaacagccaaacataagcaatgcataggacaagttatgggggtgggagctgaggggtggcaaggagggcaggcgtggagctgccacaccagggacatcaccctcctagcaccttgctgtgctcaccagcatgttagctctccgaacccatgtctaggggtttcattacaaaggtatgaccaattgattacattatttacttcttattattattattttgagactgagtatcactctgtaactcaggctggagtgcagtggcatgatctcggctcactgcaacctccgcctctcgggttcaagtggttcttctacctcagcctcctgagtagctgggactagaggcgcacgccaccacacctagctaatttttgtatttttggtagaaacggggttttaccatattggccaggctggtctcaaactcctgacctcaggtgatccaccggcccgggcctcccaaagtgctgggattataggtgtgagccactgcacctggccaactgattacattattaaccactggtgactgagctcaatctccacaccttccctctctggaggtggcagggggaccactgaaagttccaaccctctaaaatcatagctttgtccttctggtgaccagcccccatcctaaagctatctagagatccccagataagggatcccttactcattaattagtatctattttgtgtgtgcctacatcctgaactgggacaatggctacagtcatttcagaaatctcattagcgtaccaaagaccctgttatcacttcggagattccaaggattttagcagttgtgagccaagaacgtaaagaacaaatatttattttttattatatgacagtcagcctggcaccagtctgtggcgtggtctttgggcatcactccaatagatgacattatcaaagagggaaaggcagaagccatggggaattaggatcaagtgatggaatggaatggaaacaaagtaaagcttgaccccaagattagttgccagaggcatggatgtaaacagggcatattaaaacctagaaatgagtcataaacatcccagaagagcagaaaaggccagtctcagtttccagctttctgatttctccttccttctaccagcttatccagctccctatcctgaactgtgctgtcaaccttactcattcattaatatctattttgtgtgtgcctacatcctgacctgggacaatggctacagtcatttcagaaatcttaccagcagaaaagttggaatagctgggagtaaataaagctcagattcgggatcccaaatccagttgtgtagtcttagtgccacatgtggctatcaagaccaatctgccagccaggcgcagtggctcacacctgtcatcccagcactttgggaggccaaggcaggcggatcacctaaggtcaagagtttgagaccagcctggccaacatggtgaaacccctctctaccaaaaatacaaaaatagcccagcgtggtggcgggtgcctgtaaacccagctattcaggaagctgagggacgcttgagcccaggagacggaggttgcagtgaaccgagattgcgccactgcactccagcctgggcgacagagtgagactttgtctcaaataaataagtaaataaataaatctgcccatggtattagctacataccatacaaacaggacaccagatactcacctagtctctaagtcaataaataagaacttagaaatgctgaatataagttagcatacactagccaacttctagtgctatactattattattttatcccagtaagatctacttccatattgacaccaagacacagcagaaggtggagaacagcaaaaagtatttttctttttttttttttttttgagacagagtctcgctctgttgcccaggctggagtgcagtggcgctatctcagcttactgcaacctctacctgctgggttcaagcgattctcctgccacagcctcctaagtagctgggactacaggtgtgcaccaccacacccagctaatttttgtatttttagtagagatggggtttcaccatgttggccagattggtcttgaactcctgacctcaggtgatctgcccacctcggcctcccaaagtgctgggattacaggcatgagacagcacgtccagtctgcaaaaagcatttttcaaggcttttcaaaagccctcggatggtctggaaattcaggtgggagagtagcccaagacctcaaaaacccttcaagtgaatgtccgtgccttgcctgatgaccaggatacctctaacatcctcttatgttatgccttcaaaaatagtattcaagcacttatttagaactaatcttccaataaaagctactggaggaatcaaccaacaaagccttgttaaccaaaactttctgtagcacatctctacatgtcgccctgttacccaggatatttaaatcccatttctgattataatctgagcatttttctcaatttccctatagtagaaggaaaagagaatccccaaacagggagagaacaagatgaatccagataaaaccagcttgttctcaaggattctaaattatccttgaaccaaaatatctctgcaaacaggaaaaatatcttactcatttcagtactctagcaattaccacacaatacttcaaaagcttgacttgctgtaatcactcatacttatttactgaattaactgtcataaaattatgacattatttctaaaacccaatgaattactgtatacatttcctgctacatgtgggatgtactttattcacttgagtttgagcaaataaactacttatcaaagaaaattttgagtagagggcacaagatatttggtgtatgtttgctgttgtgtgtgtgcgcgctctatgtgagtgagtgtgtgtactgctattatcttgggttttataaatagacatgtggattctgctaaagtgattcctaggcagggtctttaaaatggtaactctagggaggaaaacagatcttcagctccttcccctttcatccatccacctaccctccctcctattcaccttcctgcccacctgttacttactccctgtccaaaagaattttgagatatttgtattagaaatcaattcagtaataagactcacagggtctcaagtatccacaagatcagagaactccataaaactagcctgagtgctctggtttgcctacaggccacattgtcatcagctaccaaccaccactgtggttcattctttgctgcttagaggtacacatatcaatttgtatatattcaatatgttaccaaaagtttaagaaaccaaaggaatatttgctcagaaggatttctcactcatagaaatagttctccacagccaaaaatctcagtatagttaaggacaagggacatttgtgatcatcttaatggcacacaatacaatatgtaagacctaaatttaaattccttgaaccacaatccctttaagatacctagtcagacacactcccaagaaaatgacgctaccagtggcaattaagtgctaataacaaaagcaaagctagtaagagatgagtcaaagagagggaaacatcagccattagcaaccttgcaagaggtcaaattttaccttcaacaagaaagcaatactacctttacaccttcttcagcttcatcaatatcaaatatctttttagtttttttcttctttttcttttgattaaagaagttcaagtcatctagatcatcagaagcatctaaaaagaccaaggcataattattaacaactaaaaggcaaagcatcaaattatgagttacacaaacatagttcagcaattaatcaagtcaccagaaaagactgactattaattagtccctccacaatcacaaaacttatggttcttttttttttttttgagatggagtcttgctctgtcgccaaggctggagggcagtggcgcaatctcagctcactgcaacctctgcctcctgggttcaagcggttctcctgcctcagcctcctgagtagctaggactacatgcatgtgccaccatgcccagcaaattttttgtatttttttaagtagagacagggtttcaccacgttagccaggatggtctcgctctcctgacttcatgatccgcctgcctcagcctcccaaagtgctgggattacaggcgtgagccaccgcgcccggccacaaaagttatggttctgaaaaacaaaatggtaggtcatctcaaagatctataggaaaaatctggttaggggaccatgttgagaatatttatttagtaatctgaccatatcactcttcactgttcccaagacaaagtcagagctctaacacaatttccaactctccaactttaaatcttccacttctgcttcttgccttcctcacttcaatccctggttctaaccctactgaactactttcagttcctactgcaatatacgtgcggtctctcaccaacaaaccttcccgtgggccctcttacctccatctcacaggatcttggttaaattacttccaccaaagccttctctaagcttatccatctttccccacaactgggttaggtatccccagagtgattggatagtatcttctgcttactccaactgaggtacttattaccagcttgcttatctatctccctactcaatactaagagtatatgccttgttcacctaaattctactgtctagctcaacattttattgaatcaactaatcatcaaaaggcctaacaaattatttcacattcattaaaatacagctgtgcagtaaatacaagttatcagtgaaattttacctaccattaatgagtaataataggttctgttcaacaagttttccatttgacctgccatgttataaactagaaatattttaggatccttctgctacaaagtttttcaagaaactatttacaaatccattttatcttattacaacaggaatgagttactttccaaatttgttttaaacatgtagaagacacttagcacagggcagatgctcagtgaatgtcagttgtctctatcctggcacagtgttatattcaacagacacatacaatgtttatagaaacatttctctctaacagtcaaattatgtctatgttacagcacaggggtaagtaactaaagctggtgtctaaccccaaatactttaggctataattttaatctctcatatacattttcagacttgctaagacacaaaactgcctatcttagtaccatttctttctgcccacactcaaatacaactaccattaaaaagtcagagaagagacctgatgggttcaactggaaaaccagctctggaacagcaaggtttcatctttgcaacttgtgaattaaatggaaacatccctgcaacaagcctatcagaaatctaaaaaggtccactgcatacagactactgatggccttgacttcactggaacagccttgtcaggctgagaggtcgctgcatatccaaaagccaaaacgctcatagaaccagggcttctatgacaacagtaactctctcacatcaaccacgcaccttttttcctagtgtcctcttcatcagcttccaaatccttgtcctcagttggctctggctccacttcttttgtttctgaaggctgggtttcctctgtttgggtatccccttcctcatctaacataaaaggcttcttcttcttctttttcttcttgctcatagtaggatcaaaaatcatctgtttaaaagacaaaaaacaaaaagggaccaaatgattgtttttaatgatgctcacattccaaatatgctttatcctcaaaaggcatactcttaaaagagtatgtgatacattaaaacaccaaaggggagtttaccaaaaaataaaataaattgtccacccaaccttcttgttactattaaacatcaggtgaactgaaacatgtacacatctttcaatttgtaaagtatcacagatacttcactttcactttcatgagcaaatttggacatttgaatgaatcatggaatttagggaagggactttggcaacaacctatgctatgcccctcactttacagatataggaaaacaatacctaagcggggtgtaaatttttttgtattgttttttctttgaaacagggtctcactgttgcccaggatggagtgcagtggcatgatcacagctcactgcaacctcaacctcctggactcaagtgatcctaccatcttagctccccaagtagctgggaccacaagcatgtgctaccatgcccagctaatttttttattttgtagagacggggtctccctctgttgtcccaggtggtcacaaactgccaggcacaaacaatcctcccacctcggccacacaaagcaatggaattacaggtgtaagccaccgcacctggccaggggtatcaatgttttattcaaggctggtaacttggggctgttacacagagacttgagagacttttgacctgattaaaaaaacaaaattttttttaactacaaatcttcaaggaaatccatcagcaactcttcatatagcaaatctctgagtaagagaaacctctatacaacatttcactctgctttttgtttaacattaaaggttcttttttttttttttttttaaatgaaacagggtctggctctgctgcccaggttggagtgcagtggcatgatctcagctgaatccaaccttgacctcccagactcacaccatcctcccacctcaatttcctgagtagctggaattacaggagtgcaccaccacacccagctattttttgtatttttagtattgatggggtttcaccatgctccccaagctggtcttgaactcctgggctcaaatgatccaccagcttcagcctcccagtgttaggattacaggtgtgaggaccatgccttgccccaaaattctcttattcttatctaaatgtccactatagagtaggtgaaaaactaatttataatttgtagactatctgcttgcactgatcacttgaagaaagaaaagttatctagacataatagtttaaacaacatacagggcagacacctgatagagtagaaagcgcaggaggctgggtgcggtggctcacgcctgtaatcccagtactttgggaggccgaggcgggcggatcatgaggtcaggagatcaagaccatcctggctaacatggtaaaaccccgtctctactaaaaatacaaaaaattagcagaaggtggcgggtgcctgtagtcctagctactcgggaggctgaggcaggagaatggtgtgaacatgggcagtggagcttgcagtgagccgagatcgtgccactgccctccagcctgggtgacagagcaagactcggtctcgaaaaaaaaaaagaaagtgcagggtctttgaagtcaaatagaacctgattcaaatcccaagtatttttttcctgaaccccttaccaatctctctccatattctattaataccatgcttaaattcagcattttgcccagtgatctgctgtggacagcgttaatagtaaagtgtttaaaagcacaagtctggagcccatctgactagatttaaattctgactctggcttgtacctgtgttattccacggctcatgtgtaaaatggagacaagtagcagaatgacaacaaaccacacaaggttactgggagggttaaagaagtatgtaaatgtaaaacacttgccatagtgcctggtacgtaagtactcgataaatattagcaattgtaatttatataatactttaccattcataaagcatggttttctcttgattcctatcactgaaatttcatcaattcaggtgctctaatttcccaaacatataaaactctcaaaagcttcccaaaattgattataacataaacttatttatgtcccaagatcattaatggaactagactgaaaccaagctacagtctgtaataaggtaatacagttactgtccttgcccagtagagaagtatggtatttgcatagcattttcaaagttagtcttttctcccttaacaaggatccaactgtataaataattaaatctgaaatgcagtcagtctgaagaacattatctggccaacttaaagaagtgtccctaccaagatagaagagcaaagaggaaagagtcccccactgcaaggagtactgcaataatacagggaagtagctacatttcatcttcattctagaaatagggagacttggcaaaaggacagacaaaactctagacactataaatttggttctggaagggattaccatccatttattgcattttttcaagcatcaagttccctagaatattaattgccttttaaccattattcatcaagacagactgaagatggcaaggatcctgatatcaccagaagacagcctcacaagtgccttcttatcccctgaaaaaccttatggtctacagctaaacagtttggttgtagccttgtaaaggataataaacatccaggaatcataaactgaaataattaacatctctctcaattactgtctggatacttaacatacatactcattgccttattttattcataccatcctgcgaagtacagtttacaaataaggaccagggatcccgaagcagcacccaaagcagacctccccaaaaatgaggccatgttagtcttgactaaaatggctttttaagactttcatgtctagcttccaaattataagctgactacactccaaattggttttcttttatgaaactagtttggatttgaaaagcaaatagctgttgacagtgcacatatggaaaactacagatcacttgagttatattttaggttcacaacaaagccttcaaaagcataaattttctattttcaacttctcacgtttgattggagagggcaaagaaaaggtataccagctaaaattaccctgatgctcatcaaattagaagcttcctctcatagatcataccttacccaagaaatcaactttatagtcatactatacccagaagcaggtgtgagtcacaaaagaacccacagagaagcaagacattgatctaaaagttccttccaaaggtgaccagaacaaatgctaagtgttgccatctctgtgtgataggattgtgggatttttttttttttttttagggacgggagtctcactatgttgcccaggctgaaatgtagtgactactctcaattgtaattatagcgcactgcagcctcgaactcctggcctcagcctcctgagtagctgagattacatgtgaatgccaccatgcctggcttagattctgctgtttttctttgtattcttttgtgtttcattaacttcacacaacacacatcccattttgaatcaaatacttttttttttaatttaaagcttctttttgcaaaaacaccttaccatattttatgaaaacccaatgttctgactccttgtgaatgggacctagtagcaagtaggcaagtattaaatattgatgctgcttttaacaaatagtctgaaaattactgaatgcctattgagtaggggatttttcttttcccttaccaggtagcagccatatttctaggattctgctttttaaagatcatggttccatgttgggaggctgaggcaggaagactgtttgaggccaggagttcaagacaagcttgggcaacaaagcaagacctcatttctacaaaaattaaaaaattagcgggtgcaagagcatgcacgtgtagtcccagctacttgcgaggctgaggcaggaggatcccctgagcccaggtgacagaggccacagtgagctatgattgtgccaccgcactccagcctgggaaacaagagcgagaccctgtctctaaaaaaacaaaacaacaaaaacaaacaaaaaaaatcatagttctactaggttgaaaatcgttatgttttggcaagtttctggcttaattaccaggtttaaaaataaatgtgtgcagtttatttcaattatacatcaagaaaaaaaaaaaacaaaaacagaaggctgggcatggtggttcacgcctgtaatcccagcacttcaggaggctgaggcaggcgaatcagaaggtcaggagttcaagaccaacatagtgagaccccgtctctactaaaaatacaaaaaaaaaattagctgggcatggtggcaggcgcctgtaatcccagctactcaggagaggctgaggcaggagaattgcttgaacccaggaggcggttgcggtgagccgagatcacgccactgcactccagtccagcgacagtgcgaaattccatctcaaaaaaaaaaaaaaaaaaacagaaatatgaataaaacagaaaattactttttaatagcagcctctttaattgtctagcctgaccaccaggcaggattacttccactctgggaaagtccttggcagtttataaatcattttcaagtacagagttttatctgatcctcacaagtctgtacagtagccagatgttaaaggaatggcctaaaaatacttacctagtcaacagcactacaggaaccaggccctataccctattcttcatacccctctctactcctaacttctacctggcagaatggaagccaaagaccagggttcttgtcctactaactttctgcatgatcttggacaagttaatctccctcggccctggtttcctgtaaaatacagttggaccggcacccctaagtggccaaactaatactttattggcttccaaagtcctatgccgaaatgctggttctgccatctttgcttcacaaaattctgttcatccagcagtaatgcattcatattccacttctttcaaagcctaatcccactgatccctctagccctccaagtcactacgttgatggtcctatttctaccttgtgtgtcatctagttgacccatacacagaataacaccccatggaatcttgcacacgtaagtactgtatttgccaaaggttatgagaagtttgaaaaatgagtagaaacaaaacaagtgtgaaacactgccactctcagaacttttgaaatacagcagcctagagcaatgtctataaccgccaaggaccatatacaaactttcagtttctctaacccattaagatcctagtcaatctggaattctactggtttagccacttagtatttgatcatgggcattatacaactctgtaacactcaaatttttcatctctaaaatgggcacaacaatagacctattttacaggactgttgtgagaaccaagtaagagactggaatcccgtccagaatatattccaaattccttaacttcgtcttcacagccctccatgaactagtcattacctgcttggcaagtgttcaccccttaactctaatcaaactggagattattctacttcctgtgagcacatttactggcctttctcgaccattcctttgcccttgtgatcaaggcttcctattgcctgaggaaattctcaacaacttacggggcctcccccaatgttaagcaatacctactgggagtacttaacatcaacttcattttaagtcgttagacgttatatcaactaggataaatctgagggaaagggatttgaggaaattcactgagatccaagtaccacggtaaaaaaagatccagccagtttcacagcccgcacttcccgctcacgtcgccggtagccctctgttaagggaagctcaggggctcgcccggaaactttccgggaaggtcagtcacttcctgaggctgcagaatctttttctctcgttctaaccccatcaccccctcgtctttttaaaaaacaatgctaggaaggcaaacaagggcgggataccggccccgacaagatagcctagaaagttttaacgagggcgttataccaagccaagagaggctcctcgcggcacccctggcacccccggcacccagtgaggcgagctggggcggcagtgcccagcagaaaggaatgcagggatcgccagccccagtctcgttcggggttattaaccgggcattcgagccccttccgggaggacgactcaacgtgtgctctccattccggaaacgccaaccacggcaggaggtccgcctcagcgctgccgccctgaggaaagcgggctgcggccaagcctgcggctccggagtcctcgccggctctgccgctccgggccgcctaggcgcggctgcctcacatggcggcggccggctgctaggccgcaggcccgttctcccacactggagtgggttaggcttctcgcctcaatccttagcccttacgccgggctcagatcctcacctcgtccccagacatggctgcggctcgagtgggctcggcacggacgggaagtcagacgggtcagccccaggccccggcggcagcgctgcccctgccgatacctctcccaccaccgcactaggctcttgcatcagcgaaaggaaacgacaccccgccctctcctccaagcgttggaaatgcgcctgcgcagagctcgccaaggcgcaggcgcgcagaagagccaacctagcgcgcttcgtgtggcgcgagttaccaggcgacgccgcgtcgccaggcatgccgggacttgtagtccatttataagagggttgcgcttgcgctgtagccgcccagcgacctgtgcgcggcgtctgagcgagctgcagccggaagaacattcggttgttgatattgcctcagccttttggagcattcttttgcgctgcttgtagagtgaattggggtcccttcctcctgggttagggtagtgggttagacactgagtcatatgaacccgctggagctttagtttcccacatgacccccgggcgtcatggtgtttgagaaattctgagttggagctagaggcgcccacctccctaagggtttttacttcgtaagaaatttgacggctggttttctgcttgggaggtcagaaaccaaagtatcttcccggtcttcccccgggagagataacatctcctgaggagaaacaaccacgcaagaggcagctgtcggggagcctcagaatacttgtttatgaaatctgattgaatgggtgcgccacgcaatttcccttgagacctaacaacagcagcgaccctttagggagctctcactgcggctgtgctctccagccaaagaccatcgagaacactcctgtagctggacaaagtggagtttatggtcttgcaagtagggcagtacgccgtgggaaacaccgggacgtctttggaagagggtgttggaaagaatttacagggtttgggcagggtttaaggaagcagagcttctctctggattagatgcagtcaggaggtgggggtaattctatgattgggtaatttaataattcttttttttttttttttttttttttgagactcgctctgttgcccaggctggagtgcagtggcgcgatctcggttcactgcaggctctgcctcctgaattcaagcgattctcctgcctcagcctcccgagtagccggaattacaggcgtgagccagctcgcctggcctataattcttacatgataagaaagtagaactggccgggcgtggtggctcacgcctgtaatcccagcactttgggaggccaaggcgggcgaatcacctgaggtcaggagttcaagaccaacctggccaacatggcgaaacattgtcccgactaaaaatacagaaatttgccgcgtgtggtggtaggcgcccataatcccagctactctggagactgaggcagagaatcgcttgaattcgggaggcagaggtttcagtgaaccgagtttgcgccactgcactccagcctgggtgacagagtgagactccgtctcaaaaagaagagaaagaaagaaagaaagcaggagggagggagggaaggaaggaaggagggaaggtagaaccaagtgaggctaaagctgcaattggttaaaaaaaaaaaaaaaaaaaaaaagctctgcctcccgaattcaagcgattctcctgcctcagcctcccgagtagctggaattacaggcgtgagccactgttcccagcctataattgttacataataggaaagtagaactggctgggcgcggtggctcacgcctgtaatcccagcactttgagaagccaaggcgggcgaatcactaggtcaagagatcgagaccatcctcgccaacatggcgaacgcccatctctactaaaaatacaaaaattagctaggcgtggtggtgcgcgcctgtagtcccagctactcaggaggctgaggcagcagagttgcttgaacccgggaggcggaggtggcagtgagccaagatcaagccactgcactccagcctggcgacagagctagactccatctcaaaataatggtagtaataaaaaaggccaggcacggtggctcacacctgtaatcccagcactttgggaggcgaggtgggcggatcacgagatcaggagttcgagaccagcctgaccaacatggtgaaaccccatctgtactaaaaatacaaaaattagcggggcatggtggcgtgctcctgtaatcccagctactcaggtggctgagacaggagaatcacttgaactcgggaggcagagattgcagtgagccgagatcgcaccactgcactccagccgacagagctctgggcgacagagcgagactccgtctcaaaaaaaaaaaaaaggatagagataggagataggagcatatctgttttttttgttttgttttgttttgttttttgagacggaatttcgctcttgttgcccaggctggagtacaatggcacgatctcgactcaccgcaacctcacttcctgggttcaagcgattctcctgcctcagtctcccaagtagctgggattacaggcatgcaccaccatgcccagctaattttgtgtttttagttgagacggggtttctccatgttgatcaggctggtctcgaactcccgacctcaggtgatccgcccaccttggcctcccaaagtgctgggattacaggcgtgatccaccgtgcccggccttatatctggtcatttttttgtggttggcacaatgtttatttttgtttgtttatattcagacatcattgtggagtggttttgtttttgtttggacccgccgtgctcacagaatggccttgtctgatgttggtgttctgaaattgttagtgttcaacagggcagcacatcctagttaatagtgccagccggcttcctgctatcacgggctgcatctcttttcactgtgttccacattacttaatcatatttgctgctttaggtctcaacacaactgtgtgagataatccacagacacctagtactctctactggatattagtccctaatctaagcatggcagttccttgcctccaaggagcttacatcttagtgagatggatggtttattagcccctttttccagatgaggaaactgcttttgtggcactgaataattagtcagaagccatatacagccagcaaaacaggtaacctgggaatccaagtccagacaatctgatgccagtggctgcccctttaccaccttgagaatctgaatccctaaggagcctggactagtgccatcaaacctcagtcattttcagctactgatatttgtgcataccagagttactcaatggcagcattattgacatattggcagacaattctttgtcaggccagataattctttgttgtgggatgttgttctgtgcattgtaagatgtttagcagcatcccagcctctatataataaatgccagtggcaccctccccctagttgtgacaaccaaaaatgtctccagacactcccaaatatcccctgggagagacagaatcacccctgtttgagaaccactggtgtacatcattttttggatctttgagagagaaacatttggtacatgacagtccccaaatcattttaagtgggatgccttgaagagaagagagggaaacagtgtggcctaagttttggaaaagcctgttcaactacaaaaatgacagataaaggaaaaataaatgaaatggaaaaatgaaagaagacaagtggaaaaggagcttatgaaatgatctgtgggccagacatggtagctcacacctgtaatcccagcactttgggacgccgaggtgggaggatcgctcgagctcaggagtttgggactagcctgggcaacatagatccatctctacaaaaaaaaaaattttttttaattaaaaaataagttactcagatcacaccaaagaagttagttcacactaacttaagttactcagatcacaccaaggaagttagcttgttagttcacactaacgaagacactaagagaactaagaaagtctttttttttttttcttgagacggagtattgctctgtcgcccaggctggagtgcagtggctcgatctcggctcactgcaagctccacccactgggttcacgccattctcctgcctcagcctcctgagtaggtggaactacaggcgcctgacaccacgcccggctaattgtttttgtatttttagtagagatggggtttcactgtgttagccaggacgggtctcgatctcctgacctcgtgatctgccggcctcagcctcacaaagtgctgggattataggcgtgagccaccacacccagccaagaaagtcttaatgagacctcgttgtaccttcactccctgtttgggaaatgctgctgtgtttagcaaatactcttgaccacttttatgaaaaaatttattttcccttacagcatggtaccaggtgtaatctccctgaactggctatgtgcaagaagacttccttcagagatttcaggcttcctccaaggtagcaatttcttttctaggaaaagccaagattccctggcaaaagtcacaaagcaacgatagctaaacttttcctggttttccaagagattgatcctactaacaacacaaataatttatattttcataacttctttcctccaggaatctgcaatgcatatagacacttatggattttcttctcaatacctgtgagagaaatactgtaattttgttttataaatacagaagccaagttatggaatacacacacacacacacacaccaagcagagatacagaaacaagactattggacttttcattctgggccatgctcaataccaccccagatctccaactgcccaacagtaagctaatgatgatagtacttcaattgtatgcttaattatatgttttcattggctttgaactattccacagtctccacttgacccataaaatagcaggcctgtagagaatgtgacttaaagttaaatagtgacagaacttgaactagaacccagatctcatgattcttagtgcaatactctttttatttagtaagcaaggtcacacatcctcatgggtaatatttaacttacagaaaacatgattaagataaaaattataatccacgtagaaattggtattttctgtgtggattatagccagattttctgtggaaatgcaagattttccacatagaaaatctgggtattttccacagcaagtcatcctcatctcagttaagagtactgctctttacccagttgcttaagtcaaaacccaggagttagccttgattccttcctttccctcacttcttcattcaattcactattgtcttgttgattcaatgtccaaaatagatctcaaatacaatctcttctctcgccactgccactaacctggtccaggtgattgtcatcagttttgggatactgcagcttttctcttgttccttcataacactcaccacaatttgtttaatttgtctgttgtatacttgtagttttcttaatctcacttcactactagaatgtatgcaaatttcttgaacataatacaaaaatctgtcttgttaactctgatattcccagcacctagcagagtgcctgactcatcatagtcacttaataaatatttggtggctgggtgccgtggcttatgcctgtaatcccagcactttgggaggccgaggtgggcggatcacctgagttcaggagttcgtgaccagcctggccaacatggtgaaaccctgtctctactaaaaatacaaaaattagctgggcatggtggtgggcacctgtaatcccagctccttgggaggctgaggcaggagaattgcttaaatccgggaggtggaggttgcagtgagcagagatccagccactgcactccagcctgggcaacagagcgagactccgtctcaaaaaaataataaataaatatttgataaatatttactgaattaatggttgaaaacccattagtccccaaaattacattgcttacaatgaaatagttgaggttggagcctttatttcatcatatatactaaaaatgaccaaagctaacgtaattaatctcagttgtattataatatatctgaaagaatatgttagaattgaaatggtttacttggaacccagaaggagaagaataagccaggatggcttattccattcagcagtgttcaggatagagaaattatgaatccaaagaacatggttaaaagctagtcattagagaggtatacttgttctagagcgaagataagctcaggccttacctgtgacctgaatgaaatgggtcttaataccatctcttttttcaaatgatcagaagatcatttgccaaataacattttcattagtgacttaaaatccttggttcctttgcactgggaaggaaatgctctagacagcaaacaaatattttactcactggaaacatacattctatgttatattccacagagactgtaactgtgaggataggaaattgttaatgacagctgtgtccctagttccttagaataatgcttcgcacaaagtaggttctttacaactatttgatgaatgaatgaatgtacattagtaaattaggattatcctttataccacaatctcttatgaatttggttattgtgaatcaatcctcaagtatctgttccatgatacatgctttaggaaaatcagatttctggttttggaggccaaatacgtgagttcctcagctctggtgctctactccaggagtctttgaatggctgggcgtggtggctcatgcctgtaatcccagcactttgggaggctgaggcaggaggatcacttgaactcaggagtttgagagcagcctgggcaatatagtgagaccctgtctctgtaacaaataaaaagctctgggtatttttcacaacaagtcatcctcaatgactgctgtggaacaaaacaagggtctttgagatcttatttggttagtccctgacctccttctcccatatctttttcttggttctcttgtaactccagttcatcctccatctagcccatcgagtttcctggggccgggaaaaaaacactaatcaagctgctcccttgcctaaaaatcagttaattctctgttaccttcagaagaatagatttccacagtctgcctccaagcccctctcaccatgctactgtctacccttcttaccattctccattgtgtatgctgtttcagtcatactaaatcatttaatatttcataaacatgctgtgccatttcattttttccatgctgttccctctctagaacgtccttccctcctgttcccggaatctgatgaactcctgtcatcctttaagatccagatctagactttacttttttaaagaagcctttgatttctgtacaagggaaaaaaatgattcctttctctctacttgtcttttttctattacagctcttatattatgttgtagctgtctttgagatcctggagggtgggatctgtaccttactcatatttctttgctttcccaaaacctagcacatgtttgtgaatgcaggcacccgtatggggcgataggtataagtgctaattactaacttgcaccagtcttcacttcttgaatgtcgcctccttcccaagagaggatgggaaaacctcccagctgtattctgtttggaataattggatgtgagcataggaaataaatatgttttacatactccttttatgattcactataaaaggaggtgatcagtttttgttttcacttttttgagacagggtctcactttgtcacctaggctggagtgcagtggcatgatcatggctcactgcagcctcaaacttctgggctcaggcaatcctcctgccttatcctctcaagtagctaggactacaggcaagtacctccacacccagctaattaaaaaaaaaaattgtagagatgggggtctcactgtgttgccccagctggtctcaaagtcctggcctcgagtgattctcccacctcggcctcccagtgtgctgggattacaggcgtgagccataaaagcacctgatagtcttcttgaaagattagcagactttcagtaagaagtaattaagtgtaccttgtatacactcagcaccttggtcactattcattgcccatctttctcccttgctcttaagagacttataaccccagtacccagcacagtgcatagcacctattaggagctcagtaaacatttgttgaggctgggtgcagtggctcatgtctgtaatcccaacactttgggaggccacagtaggaggattgcttgaggccagtagtttgagaccagcctggacagcatagtgagaccctgtctctacaaaaaagtaattaaaaaaaaattagccgggcatggtggcatgtgccagtggccccaactaatcaagaggctgaggcaagagaatctcttgggctcaggagttcgaggctgcagtgagttatgatcacaccactgcactccaccctgggtgacagcaagaccctgttctcttttaaaaaatcaattaaaaaaaaaagaatatgaatgttttttgatgatgttatccaaggttacttagtatcttgccatctgtacagaagacttcaaaactcttaagaaaaccacaatgagatactaccttacacccagtagaattgctattaattaaaaaaaaaacctccagaaaatgacacatattatcaagatgtggaaaaactggaacgcttgtgtatgttggcaggactgtaaaatggtgcagccctatggaaaagagtatggtggttcctcaaacatttttaaacagaattaccatataatctaacaattcaattactacgtatatttaaaaaataaaaataaaaaaacaaaaaaaaaacctgaaagggctgggcatggtagctcacacctgtaatcccagcactttgggaggctgacgtgggcggatcacctgaggtcaggagtttgagaccagccatggtcaacatggtaaaaccccatctctactaaaaatacaaaaaattagccagacatggtggccggcgcctgtaatcccagctactcaggaggctgaggcaggagaaacacttgagcccaggaggcagaggttgcagtgagctgagatcgtgccatcacactccagcctgggcaacaagagcgaagctctgtctcagaaaaaaaaaaaaaacaaaacaaaactgaaagcagtgtctcaaagagatatttttatgtccatgttcacaacagcattattcatacctgagaagcaccccgggtgtccatcagtggatgaatgggtaatcaaaatatggtgtgtacatacaatagaatatcattcagccttaaaaaggaaggaaattctgatacatgccacaatatggatgaacctcaagaacattatgcttagtgaaataagctagccacaaaaagacgaatactgtgttatcccatttatttgaggtacctagaatagtcaaattcatagaaagagaaagtagaatggcggttgctaggggctagggagagaggggggaagagagagttgttgtctaataggtacagagttccagttttgcaagatggaaagagttctggaaattggttgtacagcaatgtgaatatacttaaaaatagttgaaaagataaattttatggtatttgtattttaccatattttttaaaaagagagcactaaactgggagacaaaagaccaaggttggagttcttggttgttttccacagatagatcagtctcaaggaatttgagacttccttgaaactcaaggaagtactcaaggaagttgagtaaaggaagcttctttactcattgtttctgttaattcatctttaaacaggataaaaaagactgtggagtctagatttgtatgaggatcaaataaaaaccaaaaaaaacaaacgtttaaaataattttttgagttgtagttgttctcaatattccagagcctctgatctcttgatatttgttacaagtttcacatcttatttcataatgaaatgctaaagatgcctcagcaatagccagttgacttcaaaggtcttgtatgaggaatccttttaatttgggctattcaccttataatttggtcctgggaaaacagcaaataaataaacttttatgaggactatttatgatctaagatgctaattatcaatgtagtttagcatgaactaatgaaatacaagctcaggattttcatgttagtataaaaaagctcttcttcaacaaatccccaaatggcggatgacgcctgtgcagggggcggcagggcgtggggtgcggaggtcgggtggaggccgggcggaggccgggcggaggcccccgcaagccctgggagggatggggaaccgcggtggcttccgcggaggtttcggcggtggcatccggggccagggtcatggccgtggactgggccggagccgaggccatggagctcgcagaggcaaggccgaggataaggagtagatgcccgtcaccaagctgggccacctggtcaaggacatgaagatcaagtacctggaggatgtctcttctccctgcccatcaaggaatctgagaccattgacttttttctggggtcctctctcaaggaagagggtttgaagattatgccggtgcagaagcagacccgcgcgggccagcgcaccaggttcaaggcgtttgttgccaccggggactacaatggccacgtcggtctgtgcgttaagtgctccaaggaggtggctactgccatccgcgggtccgtcatcctgaccaagcactccattgtccccgtgcgcagaggctacgggggaacaagatggacaagcccacaccgtcccttgcaaggtgacaggccgctgcggctctgtgctggtgcacctcatccctgcacccaggggcactggcatcgtctccgcacctgtgcccaagaagctcctcatgatggctggtattgatgactgccacacctcagccaggggctgcactgccaccctggcaacttcgccaaggccacctttgacaccatctctaagacctacagctacctgaccctcgacctctggaaggagactatattcaccaagtctccctatcaggaattcactgaccacctcgtcaagacccacaccagagtctccatgcagaggacccaggctccagctgtggctacagcatagggtttttatacaagaaaaacaaactgaattaagcctgaaaaaaaaaaaaaaagctggtctcaaattaggggccaacatggaagaattaatatctgttgagtacttactaagtgtcaggccctatagatgttacatgcattatctcatttaatactcaacaacagccttgtcaggttaaaagtattatacccattttataaacaggttaatgaaggctcagagagtgtcagtcacttacccaacataacccagtgagtaacagagatggaatttgagcccaagtctgtgtgaatctgaagcccatattatttctactatgttacagtgcctctgaaaatatatttaactgtgcctacttctaatagagtttatgataaatgatatatatttgatgtttatatatttatatcaattattttacttcatcattacaagtaagatagactatctagggatgattatcaccactttacagatgaggaaacagatggtcagaaaatttaacttacctagcttcagaccagtaaatgataataacagggcttggacacatgtaccgcaactctcagactcctactttttccacattggcctatgagagtagaattttatctatattttacctatgaattttctttttttttttttttttttttttggagacggagtcttactctgtcgcccaggctggagtgcagtggtgcaatcttgactcactgcaacctctgtcccccagcttcaagcgattcttctgcctcagcctcccaagtagctgggagggattacagtcgcctgccactgtgcctggctaatttttgtatttttagtagaaatggggttatatcatcttggccaggctgatcttgaactcctgacctcatgatctactcgccttggcctcccaaagtgctggattacaggcgtgagccacctcgcccagccatatctatgaattttctggttctaactttttttaataggagcaaagagtggacatcttgacagtcttgcacttctgtttatgcttggacagattaaacacatatgtttatccctgttcactccccaaatcactgaagtgacagtgagttaacatttttaggtttaccagtctacagacaaagagaataagaaagaaatcaatagcagattaaggatatcaacaaatttttggaagatggaaaaccatagctgagctgagaaaacaattctaaatgtttgctgagggttatactaacaagggacaaacagattcgtactgcagaacactagaatgtcaggactgggacagagcagatcagaggtgatgtgagaggcagaagagagagggtttggctgaaagcctttataggaagtgaaactgccaggtctttttctccatcctactcacttagacaactaccctttcatctccctagcagcccctgggacaaaattgaggtagagaagttccagacactgagataccaggcacagctaaagatataatagcagggaggctaaggtaggaggatttcagactgaaaacagagattagatgaattgtctacatgctgaatggtgaagcgcactcagtcctcctgctgaaatttattccaggaatgctgacagcaaggcttgtattctccaggcaagatatcagggaattaattttaattaattaaccccagaggaaagatctatacatactgatatttgaggtcccccaacaaaacacctaggtacccactttatcatcctacagataaacttcctgttaacacagagcttccaaatacttagtgactcactcttaaatatgaagagacaacaaagggtcaccagatatttaagataaacctccaccaggaaagacagcatcaaatagagaaaaaagaaactcaaagggaacagaaactgaagagaacagaaaaatatttttaaaaaacaataagcagtctatgagagataatagaaaatactgcatccataaagcaaagataaaatgctctaaaaaaaatagagtaagtaacagctctggggaattaaaaatataatagaaaaattggctgggcattatggctcatgcctgtaatcccagcactttgagaagccaaggtagaaggattgtttaaagccaggagttcaagaccaaccagggcaatattagatagacctcttctctgctaaacattcttttaaaaagagaaattaggcttggttcagtggctcacgcctgtaatcccagcactttgggaggccgaggcgggcggatcacgaggtcaggagatcgagaccatcctggctaacatggtgaaaccccatctgtactaaaaatacaaaaaattagccgggcatgatggcgaacacgtgtagtcccagctactagggaggctgaggcggaagaatgacatgaacccaggaggcagagcttgcagtgagccgagatcacactactgcactccagcctgggcaacagagcgagactccatctcaaaaaaataataaataaataaataaataaataaataataaaaaaagaaaaaaaattagccagctgtggtggctcatgcatgtggtcccagctacttaggaggctgagtcaggagggctgctcaagcccaggagatggaggctgcagtgagctatgatcatgccactgcactccagcctgggcaatacagcaagacctgttctcaaataataataatagaaaaataaataatttatataagtcttaatatataaagttgaggaaatctctcagaaagtagaacagaaatacaaatggaaaaataaaagagaaaagataattagaggatgaatccataaggtcgaccattagattaacaggagttctggaaatacagaagaaatggaagaaaattatcaaagaaactgagtttccagagtggcagagcctgctgagtgcccagcataatgaaagaaaacaaaacaaaggaaaaacattatggcacatcatcatgaaattttttaacacaaaggataaagagaaaatcaaaaatcttggtgataggaggtgaggagggggcagggaaagggcaacaggttacttatgaaagagcaggtaataggaatagcatttttgtccatagtaacattagtggctagaagacgatatagggaggctttcaaaattctgagagaaaatacgttttcaatctagaactcctatactaagccatattatcagtcaagtatgaggaataaataagtatatttttaggcatgcaaggatcagaaatttacccctcatccccacataacttttcttaggaaagcactggaggatttgctctagtaaaacaagaaagacagaaaaaaaatcctaaaatttgtatggaacaaaaagtccaaatagtcaaagcaatcctaagcaaaaagaacaaagctagaggcatcacaccacctgaatttaaaatatactgcaaggctctaataaccaaaacagcatggtattgatataaaaacacagaccaagggaacaaaaagagaacccagaaataaatccacgtacagccaattgatttttgacaaaggtaccaagcacatacattggggaaaaatgttgttgggaaaactggatatccatatccagaagaatgaaactaaactcctgtctctcaccatacgcaaaaaatcaactcaaaatgtatagggaaaagaaagagcgatcagactgttactgtgtctatctagaaaaagtaagacaaaagaaactccattttgatctgtactaagaaaaattgttctgctttgagatgctgttaatctgtaactcttgtcccaaccctgtgctcacaaaaacatgtgctgtattgactcaagttttaagggatttagggctgtgcaggatgtgctttgttaaaaatgtttttgcagccaggcgcagtggctcatgcctgtaatcccagcactttgggaggccgaggcgggcagatcatgaggtcaggagatcgagatcatcttggctaatatggtgaaaccctgtctgtactaaaaatacaaaagattagccaggcgtggtggcgggcccctgtagtcccagctactcgggaggctgaggcaggagaatggcatgaacctgggaggcggagcttgcagttagccgagattgagccactgcactccagcctgggtgacagagcaagactccgtctcaaaaaaaaaaaaaaaaaaaaaatcacacctgtaatcccagcactttgggaggctgaggcgggcagatcacgaggtctggagatcaagaccatcctggctaacacggtgaaatcccgtctctactaaaaatacaacaaattagctgggcgtggtggtaggcgcctgtagtcccagctactcgggaggctgaggcaggagaatggcatgaacccaggaggcagagcttgcagtgagccgagatcgtgccactgcactccagcctgggcgacagcgcaacactccttctcaaaaaaaaaaaaaaatgtgtttgcaggcagtatgctttgtgaaagtcatcgccattctccattctctattaatcagggacacaatgcactgtggaaggccgcagggacccctgcccaagaaagcctgggtattgtccaggtttccccggactgagacagcctgagatatggcctcgtggggagggaaagaccttacagccccccagcccgacacccgtaaagggtctgtgctaaggagattagtgaaataggaaggcctctatgcggtagagataagagtgtggcatctgtctcctgcacgtccctgggaatggaatgtctcggtgtaaaacccgaccatacattctatttactgagataggagaaaacctccttatggctggagatgagacatcatggcggcaatactgctctgttactctttactgcactgaggtgtttatgtaagcttaaacataaatctagcgattgtgcacatccaggcacagcaccttttcttaaacttattcatgacacagagtctttgctcacatggtcttctgctgatcctctccccaccttcaccctatagccccgccacattccccttgctgagatagtaaagatagtgatcaataaatactgagggaactcagagaccagcgctggtgcaggtcctcacttgctgagcgccggtccctgggcccatttttcttccgctatactttgtctctatgtcttatttccttttctcagtctctcgtctccaccttgcgagaaatacccacaggtgtgcaggggcaggccctcttcatctggtgcccaatgtgggttcctttctctacggtgaagatacgctagagtgtgatcattgaagacaaatcgacgagagattcccgaagacttccatgatcagccttgtggtaagcttgtgcactcagagaaacccagggtaagaatgggtcaaactgaaagcaaatatgcctcttatctcagctttattaaagttattttaagaagagggggagttagagcctccacagaaatctaatcatgctatttcaaacaatagaacaattctgcctatggtttccagaatagggaacgttagatctaaaagactgggaaaaaattggcaaagaattaaaacaagcaaatagggaggataaaatcatcccacttacagtatggaatgattgggccattattaaaataggtttagaatcatttcaaacagaagaagatagcgtttcagtttctgatgcccctgaaagctgtgtaatagattgtgaggaagaggcagggacagaattcaagaaagtaacgcaaggttcacagtataaaaaggtagatgagtctggctgggcgcagtggctcacacctgtaatcccagcactgtgggaggccgaggcggatggatcacaaggtcaggagatcgagaccgtcctggctaacacagtgaaaccctgtctttactaaaaaaatacaaaaacttagccaggcgtcgtggcaggtgtctgtagtcccagctactcgggaggctgaggcaggagaatggcgtgaacctgggaggcggagcttgcagtgagccgagatggcaccactgcactccagcctgggcaacagagcgagactccgtctcgaaaaaaaaaaaaagaaaaaaagggtagaagagtgtaatggctcagtcaacggaaaatgttgactacaaccaattacaggaggtaatatattatgaaccatcaaaattggggggaaaaggtctagaactattggggccatcagagtctaacccacgatggccaactcctcctcccacagttcagatgcccgtaacattacaacctcaaatgcaggttagacaagtacaaaccccaagagaatatcagatagaaaaggatagtctctatcacagcaatgccaatccagatacagtattcacaatatcagctggtagaaagtaagacccaaccgccagtaccctatcaatactgaccgccagccgaacttcagtatcagccgccccccagaaaatcagtatggacagccaggaacgtttccagcaccacagggcacgcacggcgatatagcctcagctgcccactatgagacttaatcctacaccaccacctagtggacaggatggtgcattacatgaaattattgagaaggcaagaaaacaaggagagatactgaggcgttttaatttcaagtaatattagagcccatactacctggagaagggccctccccaagctgatgccagatatgagtccttttctataaaaatgctaaaagacatgaaagagggagtaaaacagtatggacccaattctccttatatgagaacattattagattccattgctcatggaaatagacttattccttatgactgggaaattttggccaaatcatcactctcaccttctcaatttttacaatttaagacctggtggattgatggggtacaacaacagatccgcaaaaatagggccgccaatcccagttaacatagatgcaggtaaaaaatagaaaaattaaaccacaaaaaatagaaataagaaaagacacattaaaaacattaaatgactttcaaaaattgctaggagatattaattggatttggccaattttaggcattcctacttatgccatgtcaaatttgttctctatcttaagaggggacccggacttaaatagtaaaagaatattgaccccagaggcagcaaaagaaattgaattagttgaagaaaaaatttggtcagcacaagtaaatagaatagatcccttggtcccactccaacttttgatttttgctactgcacattctctgacaggcatcattgttcaaaatactgatcttgtggagtggtcattccttcctcacagtacaattaagacttttacattgcatcaaatagctacattaattggtcaggcaaggttatgaataataaaattgtgtggaagtgacccagacaaaatcattgttcctttaaacaaggaacaggttagacaagcctttatcaattcttgtacatggcagactggtcttgctgattttgtgggaattattgacaatcattacccaaaaacaaaaaccttccagtttttaaaattgactacttggattttacctaaaattaccagacatgaacctttagaaaatgctctgacggtgtttactaatggttccagcaatgaaaaagcagcttacattgggccaaaagaacaagtcatcgaaactcaatatcactgggctcaaagagcagagttggttacagtcattacagtgttacaagattttaatcagcctattaatattgtatcagattctgcatatgtagtacaggctacaagggatgttgagacagccctaatcaaatatagtattgatgatcagttaaaccagctgttcaacttattacaacaaactgtgagaaaaagaaatttcccattttgtattactcacattgaagcacacactaatttaccagggtctttaactaaagcaaatgaacaagctgacttactggtatcatctgcattcataaaagcacaagaacttcatgctttgactcatgtaaatgcagcaggattaaaaataaatttgatatctcatggaaacaggcaaaaaatattgtacaacattgcacccagagtcaagtcctacacctgcccactcaagaggcgggagttaatcccagaggtctatgtcctaatgcgttatggcaaacggatgtcacacatgtatcttcatttggaaaattatcatttgtccatgtgacagttgatacttattcacatttcgtatgggcaacttgcgagacaggagaaagtacttcccatgttaaaagacatttattatattgttttgctctcatgggagttctggaaaaaattaaaactgacaatgggccaggatactgtagtaaaacattccaaaaattcttaaatcagtggaaaattacacatacaacaggaattccctataattcccaaggataggccatagttgaaagaactaatagaacactcaaaactcaattggttaaacaaaaaagaactctccctttccctctccctctccccctccctctccatctctgtctccatctccctctccccacggtctccttctccctgtctttccacggtctccctctgatgccgagccgaagctggactgtactgctgccatctcggctcactgcaacctccctgcctgattctcctgcctcagcctgctgagtgcctgggattgcaggcacgcgccgccacgcctaactggttttcgtatttttttggtggagacggggtttcgctgggttggccgggctggtctccagctcctaaccgcgagtgatctgctagcctcagcctcccgaggtgccgggattgcagacggagtctcgttcactcagtgctcaatgttgcccaggctggagtgcagtggcgtgatctcggctagctacaacctccacctcccagccgcctgccttagcctcccaaagtgcggagattgcagcctctgcccggccgccaccccgtctgggaagtgaggagcgtctctgcctggccgtccatcgtctgggatgtgaggagcccctctgcccggctgcccagtctgggaagtgaggagcgcctcttcccggccgccatcccatctaggaagtgaggagcgtctctgcccggccgcccatcgtctgagatgtggggagcgtctctgccccgctgccccgtctgggatgtgaggagcacctctgcccggccgccaccccatctgggaggtgaggagcgtctctgcccggctgccccgtctgagaagtgaggagcccctccgcccggcaggtgccccatctgagaagtgaggagcccctccacccggcaggcgccccttctgggaagtgaggagcgcctccgcccggcagctgccccgtccgggagggaggtggggggccctccgggagggaggtgggggtcagcccccgccaggccagccgccccgtccaggagggaggtgggggggtcggccccccgcccggccagtcgccccatccgggaggtgaggggtgcctctgcctggctgccccaactgggaagtgaggagcccctctgcccggccagccgccccatccgggagggaggtgggggggtcagtcccccgcccggccagccgccccgtccgggagggaggtgggggggtcagccccccgcacggccagctgccccgtccgggtggtgaggggcacctctgcccggccgcccctactgggaagtgaggagcccctctgcccggccagccgccccgtccgggagggaggtgagggggtcagccccctgcccggccagccgccccgtccgggaggtgagggacgcctctgcccggccgcccctgctgggaggtggggagcccctctgcctggccaccaccccgtctgagaggtgtgcccaacagctcattgagagcgggccgggatgacaatggcggctttgtgcaatagaaaggggggaagggtggggaaaagattgagaaatcggatggttgcggtgtctgtgtagaaagaggtagacatgggagacttttcattttgttctgtactaagaaaaattattctgccttgggatcctgttgatctgtgaccttacccccaaccctgtgctctctgaaacatgtgctgcgtccactcatggttaaatggattaagggtggtgcaagatgtgctttgttaaacagatgcttgaaggcagcatgctcgttaagaatcatcaccactccctaatctcaagtacccagggacacaaacactgcggaaggccgctgcctaggagaaccagagacctttgttcacttgtttatctgctgaccttccctccactattgtcctatgaccctgccaaatccccctctgtgagaaacacccaagaatgatcaataaaaattaaaaaaaaaaacaaaaaaaaaaaaacaaaaaaaaaaagaaaaagctgacacagttctctgaaaaaagcctagagaacacaagggtgacacaaactccagagagtatgctgcttgcagctttgatgattgtatcaacagtggtaagtcaccccatgtctgcaggagcagctgcagctaattatacctactgggcctatgtgcctttcccacccttaattcgggcagtcacatggatggataatcctattgaagtatatgttaataatagtgcatgggtacctggccccatagaggatcgttgccctgcccaactcgaggaagaaggaatgatgatgaatatttcaattgagtatcgttatactcctatttgcctagggagggcacaaggatgcttaatgcctgaaacccaaaattggttggtagaagtacctactgtcagtaccaccagtagatttacttatcacatggtgagtggaatgtcactcaggccacaggtaaattatttacaggacccttcttattaaagatcattataatctaagtctaaggggaagccttggcccaaggaaattcccaaaggatcaaaaagcccagaagttttagtttgggaagaatgtgtggctgatagtgcggtgatactacaaaacaatgaattcagaactattatagattgggcatctcgaggtcaattctaccgcagttgcacaggacaaactcaatcttgttccagtgcacatgtgagtccggctgtgaacagtgacttcagagaaggtttagataaaaataagtacaaaaggttagaatctccctacccttgggaatgggcagaaaaaggaatctctgctacaagaccaaagataataagtcctgtcattggtcctgaacatctagaattatggaggcttatgtggcctcgcaccacattggaatttggtctggaaatcaagttataggaacaaaagaccgtaagccatcttatactattgacctaaattccagtctgacaattcctttgcaaagttgtgtaaaacccccttatatgctaattgtaggaaacatagttattaaaccagattcccaaactataacctatgaaaattgtagattgtttactagcattgattcgacttttaattggcagcaccgtattctactagtgagagcaagagagggcgtgtggattcctgtgtccatggaccgaccgtgggaggcttcgccatctgtccatattttgactgaagtattaaaaggagttctaaatagattcaaaagattcatttttactttgatgcagtgattatgggattaattgcagtcacagctacggctgctgcggcagaagttgcattgcactcttctgttcagacagtacgctttgttaacaattggcaaaaaaattctatgagattgtggaattcacaatctggtattgatcaaaaattgtcgaacccaattaatgatcttagacaaactgtcatttggatgggagataagctcatgagcttggaaatcgttttcagttacactgtgactggaatacatcagatttttgtattacaccccgagcctataatgagtctgagcatcactgggacatggttagacgccatctacagggaagagaagataatcttactttagacatttcaaaattaaaagagcaaattttcaaagtatcaaaagcccatttacatttcgtaccaggaacttaggcaatcgcaggagctgctgatggcttcacaaatcttaaccctgtcacttgggttaaaaccctcagaagttccactattgtaaatttcatattaatccttgtgtgcctattctgtctgttgttagtctacaggtgtaaccagcagctccgaagagacagtaaccatcaagaacaggccataatgaagatggcggttttgtcaaaagaaaagggggaagtgtgaggaaaagaaaaagagatcagattgttactgtgtctatctaggaaaaggaagacaaaagaaactccattttgatctgtactaagaaaaattgttctgctttgagatgctgttaatctgtaactcttgtcccaaccctgtgctcgcaaaaacatgtgctgtattgactcaaggtttaagggagggctgtgcaggatgtgctttgttaaaaatgtgtttgcaggcagtatattggtgaaagtcatcgccattctccattctctgttaaccagggacacaatgcactgtggaagtctgcagggacccctgcccaagaaagcctgggtattgtccaggtttcccccgactgagacagcctgagatatggcctcatgggaagggaaagaacttacagccccccagccctacacccgtaaagggtctgtgctaaggaggattagtgaaagaggaaggcctctatgcggttgagataagagcgtggcatctgtctcctgcacgtccctgggattggatgtctcagcataaaaccgaccatatattctattctgagacaggagaaaaccaccttatggctggaggtgagacatcatggcggcaatactgctctgttactctttactgcactgagttgtttatgtaagcttaaacataaatctagcgattgtgcacatccaggcacagcaccttttcttaaacttatttatgacagagtctttgctcacatgttcctctgctgaccctctccccaccttcaccctatagccccgccacactcccctcgcagagatagtaaagatagtgatcaataaatatggagggaaccagagaccagtgccagtgcaggtcctcacttgctgagtgccggtcccctgggcccacttttcttcctctatactttgtctccgtgtcttatttcttttctcagtcgctcgtctccatcttgcgagaaatacccacaggtgtggaggggcagcctcccttcaaaaatgcattaaagacttaaatgtactccaaactgtagaactactagaagaaaacatggggaaacactctaggatatgggtctaggcaaagactttatgactaagacctcaaaagcacaggctacaaaaacaaaaatagacaaatgggactattttaaactaaaaagtttctgcacagcaaaggaaacaacagaatgaagaaacaacctgttgaatggtacaaaatatttgcaaaccattcatctaacaagggattaatatccagaatatacatggaactcaaacaactcaacagcaaaaacaattccatttttaaaagcgggcaaaggatctgaacagacatttctcaaaagaagacgtacaaaggccatcaagtatatgaaaaaatgctcaatattactaatcatcatagaaatgcaaatcaaggccaggcttggtggctcatgcctgtaatcccagcactttgggaggccaagatgggcctgaggtcaggagttcaagaccagcctggccaacatagtgaaaccccgtctctattaaaaacacaaaattagccagcgtggtggtacacgcctatactcccagctactcaggaggctgaggcaggaaagtcgcttgaacccaggaagcagaggttgcagtgagctgagatcgtgccattgtactcattgtactccagcctgggcaacaagagagaaactctgtctaaaaaaaaaagaggggggggaatcaaaaccactatgagatattgtctcaccccagttagaatggctactatgaaaaagattaaaaaaaaaaaaaaaaaaaaacagttgctggtcaggatgcagagaagaggaaacttacacaccgttggtgggaatgtaaattagtacagccattatggaaaacagtatggagatttctcaaaaaaactaaaagtagaactaccatgcgaggtagcagtctcactactgagtatttatccaaaggaaaggacatcagtatatcaagggatagctccacccatatgtttattgcagcactattcacaatagcaaagatattgaatcaactttgtgtccatcagtggatgactgagaaagaaaatgtgatatatatacataatggaatattatgtggcagtaaaaaagactgaaagctgggcatgttggctcatgcctgtaatcccagcactttaggagatcaaggtgggaggactgtttgaggccaggagttcgagaccagcctgggcaacacagtgagaccacgtctctacaaaaaataaaataaaaaattagctgagcatggcagcttgtgcctttagtcccagctactcaggagacagagtcaggaggaccacttgagcctagaatttcaaggctgccgtgtgccatgactgcaccactgcactccagcctgggcaacagagcaacagcccgttcaaaaaaaaggtggggagacagggcgcagtggctcacgcctgtaatcccggcactttgggaggccgaggtgggcggatcacgaggtcaggagatcgagaccatcttggctaacatggtgaaaccccgtctctactaaaaatacaaaaaattagccgggcatggtggcgggcacctgtagtcccagctacttgggaggctgaggcaggagaatggcatgggaaccagggaggcggagcttgcaggagccgagatcgcgccactgcactccagcctgggcaacagagtgagactccgtctcaaaaaaaaaaaaaaaaaaatgcagggtgcgaagaatgaattaggctgggcatggtggctcatgcctgcaatcccagcactttggcaggccaaggtgggtggatcacttgagctcaggagttcgagaccagcctgggcaacatggcaaaaccccatctctacaaaaaaattcaaaaattagctgggcatggtggagtgcctgtagtccaagctacttggaaggctgaaatgggaggatcgcttgagcctgggaggtcaaggctgcagtgagctatgatcacgccactgcactccagcctgggtgacagagtgagaccctgtctcaaaaataaataaataaataaataaattatgtaatttgtagcaacatggatggaattggaggtcattatgttaagtgaaataagctagacacagaaaggcgaatatgacatattctcactcatgtgggagcctaaaaaaagttgatctcatgaaagtagagagtaaaatgttagttaccagaggctaaaaggggtgtgggtgtgtgagtggggaggaagagagtttggttaataggtacaaacatacagttagatagaaagaatatgttctgatttttaatagcagagtaaagtgactatagttaaacaacagtatattatgtattccaaaatagctagaagagacaacttgaaatgttctgaacacacagaaatgataaatgctgaagatgatggatatcctaaatagcctgaattggtcattatacattctatgtacgtaaaaaactatcatatgtactccataaatatgtaccaatattatgtatcaataaaaaagaaagacaaagggaataggttttaggaagtgggatcaacctaggaaggaagcagaaggaagtcccaagaggacagctgtatgcagacttagagagactggagaaagaagtgctctaggggttgtttccagtgaacctgatagagtatctgacatgtttgactatgttgaaaataatgtaggcatttttacatttatgttggaaattctggaagaattagtgataatgacagaaaatttggcaaacaaaaactgaggcaattgttaattccaagaaaaaccaaaaatcgtgtaagaaaggaaatgtagctgggcacggtggcatgcacctgtaaccccagctgctcaggaggctgaggtaggaggatcacttgagttcaggagttccagaccagcctgaatgagagagatcccattgaaagaaaaagagagaaagaggagagaaaaagagagaaagaaagagggggagagagagagaaagagagagaaaggaaatgtgatcataatatgtctaattgatccagaagtaaaccacattagtataggagagtcataataaggttaacatgaaatattgatttaataaaatatattgtgatataacagtattgggaaagatagaaaataaaaggtgtaaattatcatatttcctgtaagatactgatattgtctggatatttgtccctggccaaatcttacattgaattgtaatccccagtgctggaggtggggcctggtgggaggtgtttgggtcatggggttggatctctcatggtttggtgctgtcttcacaatagcacaacatccggtcatttaaaaatgtgtggcgccggctggccgtggtggctcatgcctgtaatcccagcactttaggagaccgaggtgggcggatcatgaggtcaagagttcgagaccagcctgaccaacatggtgaaacccgtctctactaaaaatataaaaattagctgggtgtggcagcacgcacctgtaatctcagctactggggaggctgaggcaggagaattgcttgaacccaggaggtggacgttgcagtgagccgagattgcgccactgcactccagcctgggtgacagagtgagactccgtctcaggaagaaaaaaaaaaaaaaaaacattgtgtggtaacttctgtctctctcccctccttttgccacgtgatgtgcctgctattacaattgttagttttctgcctttgtgatgtggctaataatatcaaacgtgtgttgaagtcccctactattattgtgtgtctaagttttttcttaggtctagaagtaattattctataaagttggctgctccaatgttgggtgcatatatatttagaatagttaggtcttcttgttgaattgaacccttcatcattatgtgatgccttctttgtctttttttactgttgttcatttaaagtctattctatctgatacaagaatagcgatccttatgctttttttgttatttccattcggacgatagatctttctctgtctctttactttgagcctataggtgtcattatatgtgagatggatctcttaaagacagaagaaatggatggatcttgttttttttaatccaacttgccagtttatatctttttttttttttttttttttttctgagacagagcttcgctcttgttgcccaggctggagttcaatggcacgatctcagctcagtgcaacctccgcctcccgggttcaagtgattttcctgcctcagcctcctgagtagctgggactataggtgcgtgccaccacaccttgctaatttttgtatttttagtagagacggggtttcaccatgttagccaggatggtctcgatctcctgacctcataatccgcccacattggcctcccaaagtgctgggattacaggtatcagccactgcacctggctgccactctatgtcttttaagtggagtgcttagaccatttacttcaaggttaatattgatatgttaagttttgttgccattgtagtgttgttatctaattgctttataatcttgattgtgtaattgctttacagagtctgtgggctatgtgcttttgtggtagcaagcatcattctttagtttctgcagttagaactcccttaagcatctcttgtaggactggtctcgtggtgacaaattctcatagcaattatttgtctgggaaagaccttatttctccttcatttatgaagaggattgcttgaggccaggagttcaaaactagtctgggcaacaaagcgagaccctgtctctacaaagagttaaaaaagattagccaggcattgtggcatgcacctgtcatcccagcaactaaggaagctgacgtaggaggatcacttgagcctaggagtttgaggctgcagtgagctatgattgcacaactgtattctagcctgggcaacagagcaagatcctgtctctacctgaaaaaaaaaaaaatcctaaaaatgggcccccagtctctttttgtttgtaagtctttgctgagaaattcatttttagtctaatatgatgcttttctctagttgcctttaagattttttctttcacattaaccctggatactctgatgactatggaccttgaggatggtcatcttgcatactatctcacaggaattctctagatttcttgtatctgcatattgaactctctagccagattgggaaaattttcctgaattatatccttgaatatatttttcaagttgcttacttgtgcttctctctcagaaattccagtaagtcataaatttggtcactttatataatcccatatttattgatggctttgttcatttttttttaaatttttttatctttatttttgtctgactgggttgattcaaaggaccagtctttgagctctgaaattctttcttctacttagtatagtgtgttgttaaggcttctagctatattttgaaattctgttagtgaatttttaattcgagaaattgcttcattcattcttaatacagctgtgttatctttcaaatctttgatagttcttctgacttccctgtgttggatttcaactttctctttgatcttattgagtttctttgccattcatattctaaattctatatctgttaggatccattgcttgagacacaatggggtcctttggctaaacactttggctttttgttttcctggagttcttgccctggttccttctcatctgaaggaactgacacttcctttttttgaatttgctatcatttggatggggcttcttgattattattattatttattattatttttttgagacagagttttgctctttcacccaggttggaatgaagtggtgtgatctcggctcactgcaacctctgcccccctcccccacccccccagttcaagcaattctcctgcctcagcctcccgagtagctgggattacaggcacctgccaccatgcccggttaatttttgtatttttagtagagatggggcttcgccatgttggtcaggctggtctcaaactcctgacctcaggtgatccacctgcctcgacctcccaaagtgctaggatggattacaggcatgagccactgcacctggtggcttcttgattttttattctttttttcccttgttggcatgactgtggtgtatgttgtctatgattgattggctttatttctgggtgttttcagggtgccaaggttctgtacaggttccttggttgtagataagttcatgcagtggctttctgaaacattatttgttgtagtgatgcatgcacttttgttcagtggtataattcagttgccgtccagtagatggtgtttaagagtaagagccatcagggaggtgtgcgggtggaagcaatggagagtcaatcacaaaaagcactttccttcagggtattcaccttcagtgaaggtgaagctgccggagaagcccaagaagtggtttctgtaagcccatgctccccagccctgttgggaacagccactgtcaagtccacaacagtgcactgaggacaagggtaaggggagagagatgaccttctctctatgtctatttatgggctttggtggtactgccttcagcaactggtgctgagcttgcatttcctgtgacccaaggggggctttggcaggccatgttccccctcccatagggatggactgcaccaagggttagatctccaggggcgtagggtctgcccctctcttctgcttcttggagctggtgggacactataccccaactgaccaagggagcaggttagggcactaagcaatgacacatgcagactggttccaggtcacaaagctgtccctagctgcaagtctcaccactggtgagaaacttcagcttcagcaactctcctctcactccagtcctatgatgggagacagcctaattcagtgtttatggctggggcactcttcacactcagtgaccaattctggctgtgggcccttcccccattccagagcaagcactctaatctctagcgtgagactaaaatgcctgctgtggctgccactgccaggttgccaaacaatgtctggctttgtatgagcctggattaaaaatggcatcctctaatcccagcactttgggaggccgaggcgggcggatcacgaggtcaggagatcgagaccatcctggctaacacggtgaaaccccgtctctactaaaaaaaaaatacaaaaaattagccgggcgtggtggcgggcccctgtagttccagctactcgggaggctgaggcaggagaatggcgtgaacccaggaggcggagcttgcagtgagccgagatagtgccactgcactccagcctgggcaacagagcgagactccgtctcaaaaaataaaaataaaaataaaaatggcatcctcctcttggccccagatctgggaaactgtctgcacttttcccagtatctttccctttctctgtctcccagggcttgggagaaacgagtgtttttccgtggcctgggttgcacagatccgtagaggaaaggtgagtcatagagggagaccgactgcccctgtcatatactggagcttcactcacatttatcagccaaacaccaccacggaggctgcttgtccaccttctcctccccagggtctgggttattgtttaccatttcagtgaattcctgtcttccttcttgaattaaagctctcatagttggtctttatgtgctgttttgttgtttccaagtggctaatgcatgctgaaagcttttaatctgccatcttgaagaaaaaagcacctagtatttttaaatagaaatttatattttctggttacgaaggaaataatggctaaaaaaaaaatgaaacattccagaaacaaaaaatgaaagtcctccacaatttttattatgcatgtttaataaaagaccatgaactctgcagaggaaaaaggagaactttattttctaaaaccaatctgctggccaggcgctgtggctcacacctgtaatcccagcactgggaggccaaggcaggtagatcacctgaggtcgggagttcgagaccagcctggccaatatggtgaaaccccatcactactaaaagtataaaacttagccaggcctggtggcacacacctgtaatcccagctttcatgcgcgtccgtgtgaagagaccaccaaacaggctttgtgtgagcaacatggctgtttatttcacctgggtgcaggcgggctgagtccgaaaagagagtcagcaaagggagataggggtgaggccgttttatagcatttgggaaggtaatggaaaattacagtcaaagggggtttttctctggtgggcaggggtggatctcacaaagtacattctcaagggtggggagaattacaaagaaccttcttaagggtgggggagattacaaagtacattgatcagttagggtggggcaggaacaaatcacaatggtggaatgtcatcagttaaggctgtttttacttcttttgtggatcttcagttactttaggccatctggatatatacgtgcaagtcacaggggatgcgatggcctggcctgggctcagaggcctgacaccagctactcgggagcctgaggcaggagaatcgcttgaacccgggaggcggaggttgcagtgagctgagatcacgccattgcactccagcctgggcaacagagcgggactcagtctccaatcaatcaatcaatctatcaaagcaatctgcagactaaggagatgtagccttccatgcaaactgaaaatgtgctctgaagttttggggtgggtgaagagttagagattatatacacaaaacctgcatggtaggtgagggtaatcaggagaatgaggaacagagtcttgattggatggcctttaagcccaaaatcaccagtctctcttaataggcttgtttcaggtggttagttggttggcaccaggtggtctcttgggggtcagttgggaaattcccagctatagttgtttccaggcattgttctttgacttggttgcagaaaaccaggttttgcggtgctttctaaggtcacagagaacatgagcactcccttgccctgccatggcctcttgggtctgcttttacttttgaaccacaaggagtccatcttgtctgttaactgggggcataattcaacatttcctccttttagttgaaacctgttgtaggcagcactgatgaccaacttatgctatgtcccttattgttgctagggtgggtccatctagtccctcagtgggactcacgtggctgagagacttatggccagtttaaacaatttggaccaagcagggtgagaaggacaagcaggcacctgttagatccttatcagtgtctcttattgacgtttggtagtactggttaagtctatggataagatctggaagcaggctgagtgtggtggctcatgcccgtaatcctagcactttgggagactgaggctggaggatcacttgagcctaggagtttgaaaccagcctgggcagtatagtgagtcccatctctgaaaaacaaaaacaaaaacctagacgtgtcatgtgatcaaaatctgggttagagaactggtaaaacatttgttaatgcagacaagaataactataaagaggagctaggtacttaggcctattataagaaggatttaagacaatgtgagccaggtacagtgcttcacgcctgtaatcccagcactttggtaggccaaagtagggggatcgcttgagctcaggagttcgagaccagcctaagcaacatagtgagacctcatctctactaaaattttttttaaaaattagctggctatagtggtgcacacctgtagtcccagccactcaggggactgaggcaggatgattgtatgagcccaggaggtcaagactgcagtgagagtgagtcctgatcatgccatgaaaccctgtttcaaaaaaaaagacaataactgtggactacaaaaacttagggtagccataattaaagatgcaattggcaaagaaatttggttatttgtgtggcataaaacaatttaatataataaccataattatgactgtgataatatatactaagacatgtcagaatttagaaatatgatatgatttggaaacacattaatattaacatatataatgtgttattaatattaatttaatattaataatacatttatataaatacaactcaaagttaaacaccattttaaaatgtgacaatgcttcctgtgtgattttagcataccaaataagcctaatatgtctttctcagaccttaggggttcctgttatgtctacgtctgggtaaaaaataattgattttaaaatttgagccaggcgcggtggctcatgcctgtaatcccagcactttaggaggccgaggcgggcggatcacgaggtcaggagttcaggaccagcctggccaacatggtgaaaccctgtcttttaaaaaaaaaatacaaaaactagctgggcgcagtggtgcgtgcctgtagtcccagctactcgggaggctgaggcaggagaatcgcttgaacccaggagcagaggttgcagtgagccgagattgcgccactgcactccagcctgggccacagagtgagactccatcgccaaaaaataaaaattaaaaaaaaaattgaaatttaattttgagtagcttgtcaaatatcaaaggtttaaaacgcttgatcaaaatgaggccacaggtcactatgaaatgaaaccaaagtgacaaaagatcttaaaggcacaaagcacagaaattgatgaaacacaaaatggaatctctatttcctaggccagttactaggaaggtaaagaaaaacgttttacaatttttgttttgctttgttttgtttttaattgagacagtctcactctgtcacccaggctggagtgcagtagcatgatctcggctcactgcaagcttcacctcctgggttcatgacattctcctgcctcagcctcccaagtagctgggactacaggcacccaccaccacgcctggctaattttttgtatttttttttagtagagatggcgtttcacagtgttagccaggatggtctcaatctcctgacctcgtgatccgcctgcctcggcctcccaaagtgctgggattacaggcatgagccaccgcgcctggccctacaatttttcttaaagagcaaatcaatgttcaagaacgccctgttgcttcaaatagggaccccaactctggccttgtgtcagtgtgcttttgaattagtgttcaatttttactaaaatttacaaataattttcttttaattttagctaacttgatcacacacaaaatttctttcatcagactaatctttcccaaaccatttacaacttgtctaaaccttcagttttgtacatttcttttgtggggtgggagtattctagcttagggcaaaaatttactttctttcttcttcatcattttgaccacacacggtattttgtcatgtgaaagaaaaaattactctatctctttttaaaatttttatttgtttatttttctttttgggatggagtcttgctctgttgcccaggctggagtgcagtggcacaaccttgctcactgcaacctccacctcctgggttcaagcgagtctcttgcttcagcctctcgagtagctgggattacaggcacgcaccaccacacgcagctaatttttctatttttagtagagatgggtttcaccatgttgcccaggctggtctcaaactcctgacctcaggtgacccacccacctcggctttccaaagtgctgggattataggcgtgaggcactgcacccagcctctttttaactttttttaaaataagaaacacatccttctttctttatatgctgtctatatagaattgtttcttttatatctagcagttttcattacatatattaactataattttaactcttagtaaccctaatttctggtgaaaaacctgggaagtaagtaattttgaactgttgtatactagtatttgtagatgaaaaacattttgtaatttttagccttaaatttttgtttattaacatctaaatatattagttatttccataccatataaaagtcaaagtatataaacttaaacttatgtttaataattaatgtttcagtattttaacttacctagaaatgactcagatgttttatgattatgtattacttaatttaacagagcatgactttgagattttaaattatggaaaagaattttgaaactatgatacggataccttttctaatgtcttttccagttatcctgggttgcaagtacccaggataaaaatataaataaataaaaaagaaagaaagattggagtggctagtagtgctagtagtgatggtggcattttataattttctttttttttttttttttttttttttgagacggagtctcgctctgtcgcccaggctggagtgcggtggcgcgatcttggctcagtgcaacctccacctcccaggttcaagaaattctcctgcctcagcctcccgagtagctggaattacagacgcccaccaccatgcccagctaatttttatacttttttttagtagagacggggttttgccacgttggccaggctggtctcgaactcctgaccttgtgaaccgcctgccttggcctcccaaagtgctgggattacaggtgtgagccactgtgcctggccacattttataatttttaagagcttatgtttggcagggctttttctgtgaattttgtgtgatctgggttggggctatgtctttccagagagattgagtatttgctcttgtcaaatacctcaacgtaggactaattttttactttaattttttggcttgaaggttctaaaaacatgtggttagtgtaaatatgatcctcaaatccacctgagggtgggcctatggttatacattcttaaggaagcctttttaaaaattttttatgcagaacaaggcatacttcctcattatttctctatgatggtggaaaaactagttcattttttgactaaggtccaagttttccctggacttttgagttctaatatcctgcttcattttctattactgtgtgtctgtcagaataccaggtccttgatttctgagataagcaatcttctccactcccttatctataggattaggatcaatttgtgtttatcttccagttttagcgcctttttttttttttcttaagatggagtctctctccgtcccccaggctgtagtgcaatggcaatggcgtgatctcagctcactgtaacctctgcctcctgggttaaagtgattctcctgcctcagcttcctgagtagctgggactacaggtgtactctaccacgcctggctaatttttgtatctttagtagagatggggtttcaccatgttggccagactggtctcaaattcctgacctcaggtgatccacccaccttggcctcccaaagtgctgggattacaggcatgagccaccgtgcctggcctagatccctctttatttttagtctctggaaagagagagagagacaaagagagaggaagagagagagatcaatcctagacttttactttcttcggagagcaatatgcatttaaaataatgtttacgatattttagtcctcaattttaggcatcttgtggctgagggttttcagaaaatctagactgaaatattgctggaaacagaatggcgttaaactattccttctctcaactcctcagagtcccttgggataaaatatgcaataaacatgtgagggcctctccagtcatcactgatttattggagtctgaaaagtaaaaacaggatagtgtaatgttcctcattaggattctgcttaatacttaactattttgttaatatttggttttgcttaattttacccacatcacttttctcggaaatggacgttatgggggttctaatggcttcttgaacatcaaatagctcttaaaagtaaaaccgtgacggacagagggaattaatcaaacagggattaaatttcccttgaaacacatgtgggtttaatacacatgaaatacatacttcccttgaattacatatgagtttatgaagagcaggaaagttcttcataatttaaaaaatgtgggataatatttgagatgcttgagaaatgcaaaatgttgctgaacaaatagtcccgaccaggagatgaaaacatctcacactgtttcagacacacagtacacacttaaggaattttggcacaatctcaatttttcaaatgtttcaaacacccttaagcttatttctgtggaagaaacttctttcccacctacgtgcaatcgaatgttcagggtatgccgcaaagaaaaggaggggttagtacattctacctgaaggaatctaaaaaggcaggacagatggtgctagagctgagtcctaaaagaagagctgtttgcctggtagactatgatgggcagagggagcagcatgtgtaaagactcagaggcaggaaaacaggttggaatttttagggaactgcaattaatttgctatgccaaactatattataggaaagggacacagtgagagatggggcagcaggaccagttagaagtccaactaaagagggattcgactttatcctgaaagatcagtattatgattattatcacaatatctcagccctctatttatttagagacagagcctggctctgtcactcaggctggcatgcagtggcacaatctcagctcactgcaacctctgcctcctgggccgaagccatcctcccacctcagcctcccaagtagctgagattacaggcatgcatcaccacacccggctaatttttgaaattttaatagagacaggatttcaccatgttgcccaggctggtctcaaactcctggcctcaagtcatcctcccgcctcagcctcccaaagtgttggcattacaggtgtgagccacagcacctggcctcagcactcacttatataaatatgttttaaaattacctttatcaaggataatctatatacaataaaatgcaccaatttcaagtgtgtcttggtgacttttgacaaatttatacatctaggtaaccaacaacaatttatagaattttttctttttctttttactttttctttgatatctaataattgtacatatttatgggatcaatctttagaattccttccttccttccttccttcctttccttccttccttccttccttccttccttccttccttccttccttctttccttctttctttctttcttctttctttctttctttcttgcttttagaggcagagtcttgctctgtcatccaggctggagttcagtggtgcaatgatagctcacttcagcctcaatctcttgcactcaggcaatcctccttccttggcctcccacagcactggagttataggcatgagccaccatgcctggcctagaattttatattgagaagtgaagccagctggacttcctgggtcaagtggggttgagtggggacttggagaacttttttgtctagctaaaggtttgtaaacacaccaatcagcactctgtaaaaacgcaccaatcagcactctgtgtctagctaaagatttgtaaacacaccaatcagcacactgtaaaaatgtaccaatcagtgctctgtgtctagctaaaggtttgtaaatgcataagtcagcgctctgtaaaaacggaccaatcagcactctgtaaaatggactaatcagcgctctgtaaaatggaccaatcggcaggatgtgggtggggccaaataagggaataaaagctggccacccgagccagcagcggcaacccgcttgggtccccttccacagtgtgacttttgacaaatttatacatctaggtaaccaacaacaatttatagaattttttctttttctctttaattttctttttctttttaattaactcgaacaaagtgtgggagctttgttctttcactcttcacaataaatcttgctgctgctcactctttggggctgcactaactttatgagctgtaacactcaccatgagggtctgtggcttcattcctgaagtcagcaagaccatgaacccaatgggaggaacaaacaactctggacgtgccacctttaagagctgtaacactcgctgtgaaggccttcggcttcacttctgaagtcagcgagaccacaaacccaccggaaggaagaaactctggacacatctgaacatctgaacaaactccggacacaccatctttaagaactataacactcagcacgagggtctgcagcttcattcttgaagtcagcaagaccaagaacccaccagaaggaaccaattccggacacattttgacaacccagatgggacacattttggtgactccaccaggacagtcaccaagcagtgagtacctttggacccctttcacttgctattctgtcctatttttccttagaatttgggggttaaatactgggcacctgtcaaccagttaaaagcgactagtgcggccaccagactaaagacatgggtgtcaggctttctgggaaagcactctctaacaacccccaactcttcatagttgggagcgttggtttgcctggaaccagctgccgctttccctgtacttccgggctgagctgagggttgacagaatggaaagccattcagctctggggtcccaacaacaagtcggttgacactgcagccatgagtggaactctcaaagtcatgtcacccaagcgagactcgcccatctatcatatctatcctgacccttgcctcctgggtcctaatgcttgtcagacaaacttcctctcacctctcttctccaaggctagtcccacttctaaaaaccactccttgtctctggtgcttttctagtttctcctataagaatgatctctagtataaactacaggactctattcccttctttaggcacccaggctcactaatcagaaagacacaatttttgcccaaagccccgttgggggcgggggactatcttatctggaattttagtatccctcctcagactagcaggcctaacaaaagctattcctgaagctaggatatggggagcctcagaaatgatatccttcctgttcaagtgaggacaaaaggcatcagtcttccaaccctggagatcccttccctccctcagagtatggccctccacttcatttttggggcataacatctttataggatggggtaaagtcccaatactaacaggagaacacttaggactctaacaggtttttgagaatgcgtcagtaagggccactaaatccaatttttcttggtcctttttgtggtctaggagaacaggcaagggcgcaggtttttaagaatgcattggtaagggccagtaaatccgactttccttggtcctccttgtggtctaggaggaaaactagtgtttgtgctgctgcgtcggtgagcgcaactattctgatcagcagggtccagggaccgttgtgggttcttcggcagggggagaaacaaacaaaccaaaaccatgggtggttttgtctttcagatgggaaacactcaggcatcaacaggctcacccttgaaatgcatcctaagccattgggaccaattcgacctgcaaatcctgaaaaagaggtggctcaattttttctgcactatggcttggccccaatattctatctctgatggggaaaaatggccacctgagggaagtataaattacaatactatcctgcagcttgaccttttctgtaggagggaaagcaaatggagtgaaataccttatgtccaagctttcttttcactgaaggagaatacacaactatgcaaagcttgcaatttacatcccacaggaagacctctcagcttacccccgtatcctagcctccctataactccccttcctattaatgataatcctcctctaatctcccccaccaagaaggaaacaatcaaagaaatctcccagggaccacaaaaacctccaggctatcagttatgtccccttcaagctgtagggggaggggaatttggcccaacctgggtacatgtccccttctccctctctgatttaaagcagatcaaggcagagctggggaagttttcagatgatcctgataggtatatagatgtcctacagggtctagggcaaaccttcgatctcacttggagagatgtcatgctattgttagatcaaaccctggcctttaatgaaaagaatgtggctttagctgcagcctgagagtttggagatacctggtatcttagtcaagtaaatgatagaatgacagctgaagaaagggacaaattccctaccggtcagcaagctgtcccctgtatggatccccactgggacctcaactcagatcatggggactggagttgtaaacatctgttgacctgtgttctagaaggattaaggagaattaggaaaaagcccatgaattattcaatgatgtccaccataactcagggaaactaagaaaatccttctgccttcctcaagcggctatgagaggccttaagaaaatatactcccctgtcgcctgactcactcgagggccaattgatcctaaaagataagtttattacccaatcagccacagatatcaagagaaaactccaaaagtgagccctgggccctgaacaaaatctggaggcattattaaacctggcaacctcagcgttctataatagagaccaagaggaacaggccaaaaaggaaaagcgagatcagagaaaggctgcagccttagtcatggccctcagacaaacaaaccttggtggttcagaaaggagagaaaatggagcaggtcaatcacccagtagggcttgttatcagtggtgtgcaaggacaccttaaaaaagattgtccaacaagaaacaagctgccccctcacccatgtccactatgccgaggcaatcactggaaggcacgctgccccagaggacaaaggttctctgggcgagaagcccccaaccagatgatccagcaacaggactgagggtgcctggggcaagcgccagctcatgtcatcaccctcactgagccccaggtatgtttaaccattaagggccaggaaattgacttcttcctggacactggcgcagctttctcagtgttaatctcctgtcccggacagctgtcctcaaggtctgttaccatctgaggaatcctgggacagcatgtaaccaggtatttctcccacctcttcagttgtaattgggagacttttctacagatagtaagtatacttatctaatcctacatgcctatgctgcaatatggaaaaaagggaatttctaacctctggggaaacccccattaaatatcacaaggaaaccatggagttattgcacacagtgcaaaaccccaaagaggtggcagatggagttactgcacgcagtgcaaaaccccaaagaggtggcagtcttacactgccgaagggaagtgagaggggagaacaaaagggaaggagaaggggagaacaacagcataagtggctggcaggggcagggaaagaccaacagagagttaaagagagagacagagagagacagagacagaaagtgagagagagagatgaagtgataaagacaaagagggagtcagaaagaaaaggggtgggggaagacagaaagagagaaggaaatagaggaagaggcaaaggagtcaaagagagagaaagagatagaagtagtaaagaaaaaacagtgtaccctattcctttaaaagccagggtaaagttaaaacctataattgataattgaaggccttctctgtaaccctataacactccaataccatcttgttgttagtgtaaacaagggtatagcccgaaagcactgaggccactgacaagccatagccttcctatcaaaaatccttaacccagcaagtttcctaacaggggatctaaatcttaattaattaccatacaaaggtctgaccagaccaaggaggaattcccttcaggacaggagatagatgtttcctcccaggcgattaagggaaaaagacacaatgggtattcagtaagtgataaggaaactcttgtagaagcagaattaggaaaattgcctaataattggtctgctcaaatatgtgagctgtttgcactcagccaaaccttaaagtacttacagaatcaggaaggagccatctataccaattctgagttaatatgaactgaacaaggttttattaatagcaaagaaaaattaaaatcccaaacttacaaggttttcaactaaagtaaagtttgctaaaagttaacagtgtaacatgtattatcctactaccacacactgtcaaaggatttctcagacagtttgcaagaaaaaacgaaatctatccttactctacaatcccaaatagactctttgatagcattgactctccaaaaccactgaggcctagacctcctcactgctgagaaaggaggactctgcaccttcttaggggaagagtgttgtttttacactaaccagtcagggatagtacaagatgccacccagcgtttacaggaaaaggtttctgaaatcagacaatggctttcaaactcttacaccaacctctggagttcagcaacgtggcttctcccctttctaggtcctgtggcagccatcttgctattacttgccttcaggccctgtatttttaacctccttgtcaaatttgtttcctctaggatcgaggccatcaagctacagatggtcttacaaatggaatcccgaatgagctcaactaacaacttctaccaaggacccctggaccaatctgcgggccctttcactggcctaaagagttcccctctggaggacactacaactgcagggccccttcttcacccctatccagcaggaagtagctagagtggtcattgcccaattcccaacagcagttgggttgtcctgtttagagggggtattgagaggtgaagccagctggacttcctccatcaagtgaggacttggagaacttttctgtctagctaaaggtttgtaaacgcaccagtcagcactctgtaaaatgaaccaatgagcgctctgtaaaatggaccaatcagcaggacatgggcagggccaaataagggaataaaagctggccacctgagccatcagtggcaacccgttcgggtccccttccacagtgtggaagctttgttctttcactcttcacaataaatcttgctgctgctcactctttgggttagcactacctttatgagctgtaacactcaccacgagggtctgtggttccattccagaagtcagcaagaccacaaacccactgggaagaacaaacaactccagacgtgccacctttaacagctgtaacactgactgcgaaggtctgtggcttcacttctgaagtcagcaagaccacgaacccaccagaaggaagaaactctggacacatctgaacatctgaacaaactccagacacaacatctttaagaactgtaacactcaccacgagggtccgcagcttcattcttgaaagtcagcgagaccaagaacccaccggaaggaaccaattccagacacaatattacctcagaaactccgcttgtgcctcttctcagtcaatcccataccccccgcccccagtgcacacacacatatcaaggcaattgttatggatttctgtcactataaattagatttgtctttcctaaagtttcaattaaatggaataatatactatatactcttgtgtctggcttctttccctcagcatgatgtttttgaggtttacccatgttgttgtacattagttcattctgttttttgctaaggtttaattagacttatataacaaatactgggcatggtggcattacagtaactcaggaggctaaggtgggaggatcaatttgagggcaggagagttttgaaagcagtctgggcaacatagcgagaccctgtctctacaaaaaaacaaaacaaaacaaaacattagccgggtgtggtggcttctgcctgtattcccagctgcttggtgtggggaaaagaaagatcagatcgttactgtgtctatgtagaaaaaggaagacataaagaaactccattttgatctgtactaagaaaaattgttctgctttgagatgctgttaatctgtaactcttgtcccaaccctgtgctcacaaaaacgtgtgctgtattcaatcaaggtttaatggatctagggctgtgcagggtgtgccttggtaaaaatgcgtttgcaggcagtatacttggtgaaagtcatcgccattctccattctctattaaccagagacacaatgcactgcggaaggctgcagggacccctgcccaagaaagcctgggtattgttcaggtttcccctcactaagacagcctgagatatggcctcgtgggaagggaaagaccttacagccccccagcctgacacccgtaaagggtctatgctgtagaggattagtgaaagaggaaggcctctgtgcagttaagaggaaggcatctgtctcctgcacatgcctgggaatggaatgacttggtataaaaccgaccacacattctattctgagataggagaaaacctccttatggctggaggtgagacatcatggcggcaatactgctgttactctttactgccctgaggtgtttatgtaaagttaaacataaatctagcctacgtgcacatccaggcacagcacctttccttaaacttatttatgacacagagtcttttgctcacatgtttttctgctgaccctctccccaccattaccctatagttatgccacattccccggccgagatagtaaagatagtgatcaataaatactgagggaactcagagaccagtgctggtgcaagtcctcacctgctgagcgctggtcccctgggcccacttttcttgctctatactttgtctccgtgtcttatttcttttctcagtctcttgtctccaccttgggagacaggagtaggcccccttcagcttgggaggctggggcaggaagatcacttgaccccaggagttcgaggccgcactaagctatgatcatggcactgcactctagcctgggtgtcagagcaagactaaatctccaaaaaaattaaaaaataaaaaagtaatttgaaaaattaatgtaaaaagatttatataccatactttgtttatctagtcaactttcgatggacatttgggtcatttccagtttctagctatacaaggctgctgtgaacatttgtatacaagtctttgtcagcactcactttaacgtatggtatagctaataaatttgtctaggaagatgctactaccccatcaccactagccaaagtatatgtatgtgtggccaggagtagaggggagggcagcatgaagaatttgtctcaggcccggacaatcatagttcctcattcccctggcaacagtaattggtccaaggagcaggcatatgacccagaaaggttagttagagtcttttcccaaaagaaagaaaaaaaaaatttcttcttgggttgctaaaatgggacaatgtgtacttgaggttatacaggctggccttgaactcctgaccacaattttctgcactggttgtatagaggcagcccttctacagcaggagaaaatcagaacaatgagtaagggaaaatggggtgggggagacagaaagaatccctgcctcctccataaattagacttatgccagacaggaacactcatgtttagacaaaattgggagtctgaaataaacctaataaagaagaaactagaggttagaagagaatggacatagtagatacggctgaaattaaaatacaaaattaaaaaatgcaaaaattggccaggcgcagtggctcatgcctgtaatcctagcagtttgggaggccgaggtgggtggatcacctgaggtcaggagttcaacaccagcctgaccaacatggtgaaaccccatctctactaaaaatataaataattagctgggcgtggtcgtgggcacctgtaaccccagctattcaggaggctcaggcaggagaattgcttgaacccaggaggtagaggttgcagtgagctgagatcacgccactgcactccagcctgggcaacaagagcaaaactctgtctcaaaaacaaaaaacaaaaaaataaaaaaaaattagccgggtgtggtggtgcacacctgtaatcccagctactcgggaggctgaggcacaagaatcacttgaacctgggaggctgaggttacagtgagccgagatcacaccactgcactccagcctgggtgacaaagcaagactctgtctcaaaaaaaaaaaaaaaaaaagaaagaaaagaagaagtttgcattttatgttgtagacattgggaaattgtatcagtctgttagggctaccataacaaagtactgcagactgggtgacttaaacaacagaaatctattttctcatagttctgaaagctagaagtctgagatcaaggtgttggcaggtttggtttcttctgaggcctctctcttctctccttggtttgcccacggccgtgttctccctgtatctgtgtcttcacctggtcttccttctttatgtgtctgtggccaaatttcctcttcttataaagatgcaagtcatattggattagggccttttttttctttgagactgggtctcactctctttcccaggctgaagtgcagtgaggcaatcatagcccaccgcagccttggacttagtggcttaagtgatcctcctatgccagcctcccaagtagctaggactacaagtgtgcaccaccatgccctgctaatttttctaattttttttggagatggggtctcactatgatgcccaaagtggtctcaaattcctggcttcaagcaatcctccagccttggcctttcaaatttctggaattacaggcatgagccaccatacctggccatggcctcatctttaattacctctttaaagaccatgtctccaaatgcaggcacattctaaggtactagggcatagaacttcaacaaacttcaacatatgaattttttttttttttttggagacagagtctcactgtcacccaggttggagtgcaatggcatgatttcaactcactgcaacctctgcctcctgggttcaagcaattctcctgcctcagcctcccaagtggctgggattacaggtgtgtgccaccgcgcccggctaatttgtctttttagcagagacagggtttcaccatgttgtccaggctggtcttgaactccttttttttttttttgagatggagttttgctgttgttgcccaggctggagtgcagtggtgtgatctcggctcactgcaacctccaccttctgatttcaagcaattctcctgcctcagcctcccaagtagctgggattacaggcacccaccaccacacccagctaatttttttgtgtttttagtagagatggggtttcaccatgttggccaggctagtctcaaactcctgacctcgtgatccgcccacatccccctcccaaagtgctgagattacaggtgtgagccaccatgcccggccagtcttgaactcctaacatcaagtgatccacctgccttggcctcccaaaatgctgggattacagggatgaacaaccatgccaggcctcaacatatggatttttatgggaaaacaattcagcccgtaagaggagccatcaaagactttctttccactacttcatatgttttattttgttgtatattcttctagaaccaggttcattttttcagttttgtagaaaaatagatgttccagccaccatttacataattgtctagttttttaagaccaatcagatatgttccctggaaagatgaatagaagaattttttttttttttttgagatggggtctcgctctgtctcccaggctggagtgcagtggcacaatcttggctcactgcaacctccacctcccgggttcaagcgattatcctgccttagcctcctgagtagctgggattataggcacgtgccaccacgcctggctaatttttgtatttttagtagagatggggttccaccatgttggccaggctggtctcgaactcctgacctcgtgatctgcccactttggcttcccaaagtgctgggattacaggcatgagccactgcacccggccgaatagaagacttaaaaaaaaattttttttgtagggatggagtctcactgtgttgcccaggctggtcttgaactcctgggctcaagcaattctcccactttggcctcccaaagcactgagattacaggcatgagccactgtggctagttcacatggaagacttttttttttttttttttttttttaatacagagtcttgctctcccccaggctggagtgcagtagtgcaatctcggcttagaaaaaccaccacctgccaggttcaagcaattctcctgcctcagcctcccaggcagctgggattacaggcaaccaccaccatgcccggctaattttgttgcatttttagtagagatgggcttttgccatgttggtcaggctagtctcgaacccctgacttcaggtaatccactcaccgcagcctcccaaattgctgggattacaggtgtgagccatcgtgcccagcctgaagacttttaagtagagaagggcaagaacagatctatacttgaaaacattactggtaacagtgtggagaatggactgcaggaggaaaagagaagaggtatgaaggcttgttagagtcttttggaatttcccaggcaaataaatgataaaagcctgaattagcctactctctgacacctgattagaatataaatcacctatagatagagtggcttatgagcggttgatgacttcccactaggatgaattatttcatacaggatgtttatgcacatttgctttgaagagggagaaaggcttttcctattgtcacagctgccagcattcacccaggcaagcttccagcttgcttatgtctgcagcttgattttatagtctgcgttttgttggaaaataaattatttgggggctgctttttattaaaagggaaaccttaccgaggacttcctcacccttactatctgcctaaataatttctttttaactcctatatcaaaaaatccacaaaacatggaattgggccctacttggattctacgttctggaattactgggtgaataaccttgggaaagtcattttatctctctgaacttccattttatgatatgtaaaatggagatgataatttctaccatgcaagtttgtcaaaataattaaatgagatcaggcaggcagggtggctcacacctgttatcccagcaagttgggaggccaaggtgggtggatcacctgaggtcaggagctcaagaacagcctggccaacatggcgaaaccccgtctctactaaaaatacaaaaattagccgggtgtggtggtgcacgcctgtaattccagctacttgggaggctgaggcaggagaattgcctggacccaggaggcagaggttgcagtgagctgagattgcgccactgcactccagcctgggcaacaagagcaaaactccgtctcaaaaaaaaaaaaaagaaagaaaaaaaaacagaattaaatgacatcatgaatgaaaactacttttattttttatttttatttatttatttttttgagacaggatcttgctggagtgcagtggcgtgatcatggctctctgcagcctcaacttcccaggctcaagtgatcctcccacctcagcctcctgagtagctggaacttcaagtgctcaccaccacacctagctaattttttgtagagacggaatctcattatgttgcccaggctggtctcgaactcctgggctcaagcgatcctcccacctcggcctcccaaagtgctgggataacaggcatgagccaccgtgcctggcctgatctcatttaattatgttaacaaacttgcatggtagaaattatcatctccactttacatatcataaaatggaagttcagagagataaaatgagccacctcacccagcccatgaaaagtattttaaatatctgtacacatgttatttattgcacttggtatccctaaaagatacttttatgtctgtaggtgggagtgggaagcagatatttgttacagagaacaatagtggctatgatttactgagttgcctgctatgagtcctggatgtgagccttagagtacctctttcttctagaagggatccctaggtcacaggagctggttgggtagtagttgtatcaacatctgagaaaaacatgactcttctgtgggctatttggatctgattaccagaaaagaaaaaaatttggtttgatttcaataaatgctagaatttgtaggggcagatttagtatcactaagacaaaggaaagagagcacattgacaaaagaaggaaaaaaaaaagagaaagagagcctcagaaggaacatgaaaataaaaagcaaaaactagaaaagacactagaaaaggaaaaacagactttcccaagtgtctcctatttcagactttgtattcatgtttcatttctcattgttgtctcttgaggaagaactattctgtttaatataatttatgcatagtgaatgtcaacatattgttagtaatactgttgttacaacaaatgattccagaaaattttggcttgagtttgttattacatataataattagcatttctataaattccatacctcactcaaatccttcagatgtgggattgctgaggaaatgactttgaaactgaaacctgaaggataagtaagatttagttctgagaagaatgggggaagaatagtccaggcagaggaaatgccatgtttatagccctgagacaggaaagagttcatcgtggagttcatcaaagcaggctcatgtggcagatctcgggagtctatgcaggcaaaacttggtaaaaaaaaaaaaaaaaaaaaattcttcttttgtgtctcaagtgcttagagttgacactaattgttaagtgtcttgggtgtccaggctcaaacaactgttaacagttgaaacagctacccctgaggccaggactagttctgccccagtgaggacaaagagatttgaggagaggagaaaaatcgaacttaaggatccagcatatttattcagtatgtcctcattcatagctctccctttttttgtttttgtttttgtttttgtttttgagacacagtcttgctctgttgcccaggctggagtgcagtggcacagccacggatcactgcagtcttgacctcccaggctcaagcgatcctcccgcctcagcctccccggtatttgagactacaagggtgtgccaccctgcccagctaatttttttttatagagacagggtctcactatgttgaccaggctggtctcaaactcctgggctcaagggatcctctcactttagcttcccaaagttctgggattacaggcttgagccaccacacccagctagtatgccctcataggtagagtgtttaaagtttaattgtttttattttcttaacactctactatagttttttatggtgttaatttttctggtgatttggtgaccggtctagttccagcatcccctgtttctgtgattgccactcctgctgccatcatcacctctgtggctgtttactaggccaggcactttatttcttattttttttccgagacggagtcttgctgtgtcgcccacgctggagtgcagtggtgcgatcttggctcactgcaacctccacctcccaggttcaagcaattcccctgcctcagcctcctgggtagctgggattacaggcaaacactaccacgcctggctaatttttgtatttttagtagagacagggtttcaccacgttggccaggctggtctcgaactccagacctcatgatccacctacctcagcctcccaaagtgctgggattacaggcgtgagccaccacacttggccagccaggcactttaaagccacctttgactcttctgtcctttataagaacaatagatttcacctctgtgttgtctctctgatgagttacctctggtctattcttatggccacggactgtgttaggttctttacttagtttcctgactccagcctcatccagcttaatctgtccttcgggttcctgccatcatttgtcctctttgaatactgttctaattctgcccctttcttagctctgaccgttttctctgtccacaaattcccacaaagctgtctcacctgtaggcctcaaaaatgcatcatccttgggccaggcgtggtggcttactcctttaatcccagcactttgggaggccaacgcaggaggatccctccaggccaggatttcaaagctgccttgagccatgatcatgccattgcactccagcctgggcaacagagcaagaccctgtctctaaaagcaatacaaacaaaacagaaggtatcattcttcattctttttgttttgttttgtttgagatgggtcttgccctgttgcccaggctggcgtgcagtggtgcaatctcagctcactgcaacctccacctcccaggttcaagcgattctcctacctcagcctcccaagattacaggcaccatgtccggctaatttttttgtatttttagtggagatgggggtttcgccatattggccaggctggtctcgaactcctgacctcaagtaatctgcctgcctctgcctaccagagtgctgggattacacgcttgagccatcgtgcctggcccagaatgtatcgtccttaagattacgtcagactttgcccttgttctgcctttctagtatacttcttttcctatccccaactcactctctggccatcccaattttatagtcttccaggcctttagggcattcttttattcattcattcaataaatgtttattgagtatctactatgtgtcagacactgtgttaggcactggagatgcatagtgagccagacagacacagtccctgcccttgtggagcctacactttcacaaaaggatggtgaagttccaaccaaagaaatatatcaagccagagtaagacaagaaaattttccccatagcagattaaataaattcctaggactcttccagctgaaaggttgaatctgaaattagattgggaagctagtgggctacaagttactcatcagtggtctagactgggtagtaaaggaaaataaggttggaggggttaagactaatttatggaaggctttgaataccaggctaataagttttaaatacagttgtagacaatgatgaggcatccactttttctgatctgatcccttcttttttttttttttgagacagagtctcgctctgtcgcccaggctggagtgcaatggcgcagtctcggctcaccgcaacctccgcctcccggggtcacgccattctcctgcctcagcctcctgagtagctgggactacaggcgcccgccaccaccacgctcggctaattttttgtatttttagtagagacggggtttcaccgtgttagccaggatggtctcgatctcctgaccttgtgatccatccgcctcggcctcccaaagtgctgggattacaggcatgagccactgcgcctggccctgatcccttctttagagacccagagtcttgtttagtcacccaggctggggtgcagtggtacaatcatagctcactgcagccttgaactcctgggctcaagcagtcttcccgcctcagcctccccagtagctggaaccacaggtttgtgccaccatgcctaattgtttgtttgtttttgtagaaacagagtctcactgtgttgcccaaggtagtctcaaacaatcatcccaccttggcctcccaaaagtgctgggattataggcataagccaacatgccctgctgatcctttcttaaaattcagattctaggctgggtgcaatggctcatgcctgtaatcccagcactttgggaggctgaggcaggtggatcacctgagatcgggagttcgagaccagcccaatcaagatggagaaaccctgtctctattaaaaatacaaaagtagccgggcgtggtggcgcatgcctgtaatcccagctactccggaggctgaggcaggagcatcacttgaacgcaggaggtggaggttgcagtgagctgagaatgctccattgaactccagcctgggcaacaagagagaaactccatctcaaaaaaataaaaataaaataaaataaaataaaaacggatcacgaggtcagcagatcgagaccatcctggctaacacagtgaaaccccgtctctactaaaaatacaaaaaattaaccaggtgtggtggcgggcacctgtagtcctagctacttgggaggctgaggcagaagaatggtgtgaacccaggaggcggagctggcagtgagccaagaccacgccactgcactccagactgggagacacagtgagactctgtccccccaaaaaaaaaattcagattctaaagaaccactagctttcttcactcccaggtttcttcaacaaaactggaaaaggtaggtattgtctacaaatctttacactaggtgactgactaatgatctacatttgaggttgcttctttttttttaatttattttttattttatgtatttattcatgtttttgagacagtctttctcttgtcgctcaggttggagtgcaatggcacaatcttagctcactgcaacctctgcctcctgggttcataccattctcttgcctcagcctcccaagtagctgggattataggcgcccaccaccacgcccagctaacttttatatttttagtacagacggggtttcgccatgttggccaggctggtctcgaactcctgacctcgtgatccacccgccttggcctcccaacgtgctgggattacaggtattagccaccatgctgggcttttttttttttttttttttttctgagatggagtctcgctctgtcacccaggctggagtgcagtggtgtgacctcggctcactgcaacctctgcctcccgggttcaagcaattctcctgcctcagcctcccaaatagctggcactacaggcgcgtgccaccatgcctggctaattttgtgtgtgtgtgtgtgtttagtagagatgggggtttcaccatgttagccaggatggtctcgatctccttacctcgtgatctgcccgtcttgccctcccaaagtgctgggattacaggcgtgagccaccgcacccggccttattttgtatcttttttttttttttttttgagacagagtttccctctgtcatccaggctggagtgcagtggcgtgatcttagctcactgccacctctgcctcctaggttcaagtgtttctcctgcctcagcctcctgaatagctgggattacacgcatgcgccaccatgctcagctaatttttgtattttcagtagagacagggtttcgccatgttgcccaggctggtctcgaactcctgacctcaggtgatctgcctgcctcggcctcccaaagtgctaggattacagatgtgagccaccgtgcccagcctgattcttttaatatttgcatttcagccatcttttgtaacttacattttttctgatagtggaatcagaggtttaaaaaaaaatcaaaaagccaaaccataaaattccatattcaccttctttccagggcagaacaaactgaagcctgccaaacttgctccctaaaaccaatagggtcagaggaatgcatgccttcccagtcttctctgtatctgctggcttctttcttttttctggcatgagcactcacctctagaccacagccagccactcctctgaggggaaagcccaggctttccttcctctgcctttacatatcctttctctccctctgcccatgtttcccaggtgttctacttgctgctactttagttaacatttaatgactattaataccataatccttcatagctgacatcctgtaacaacatccctttgccatctaaattacctagaccaatagtaaggagattttttaaagagcctgaattcattttctttatagcaatattagttaacccatagacaattaattatacacacaatcatattacttcagtttggcatgggtttacacatagatcgtgcttttacagttatttacagataacttccttgtctattcccagcccatactagaattccacctgtaacttttctagccatggtagaagtagcaatttcccaagctacattccacagttattcctaacttctgggttaaaaatgcccacttcagagcctcttgaaccccaactactaaagtaccactttgaaatctgcctgcaaaaaatgtccagactacccattcccttccacgtcatacaccttagtccatctgttcacaccatcctcagcctgtcaagctttccttacagctttttctaaaaatgcctcatcatgtcacctacaagcacagagctgcatatattgtgttgctcaatcaccttcattgaaatattaggatgactacattaggacaaaaacctaaaactcagttatattttaattatcctcaccttagatcacagcccatccacaaatcatgtttgatttgggtggaaaaggtcattttagcacgagagtgtagtggtcaaaaggatagaattctgtcacctgttcataagtttaggcctttttctttttttttctttttgagatggagtcttgctgtgtcacccgggctctggagtgcagtggcgcgatcttggcacactgcaacctctgcttctcgggttcaagcaattctcctgcctcagcctcccgagttgctgggactacaggcacacgctgccacgcccagataatttttttttgttttgtattttttttttttagtagagatggggttcactatgttggccaggctggtctcgaactcctggcctcgtgatccgcccgcctcggcttcccaaagtgctgggattacaggcatgagccaccgcacccagtcgctgattttttttttttttttgtattttagtagagacggggtttcactgtgttgcccaggctggtctgaaactcctgagctcaggcaatccacccacctcggcctcctaaagtgctaggattacaggcatgagccactgcgcctggccgtttaggcctcttttgctaaaactgcatgaaagcatgtgtcaagagaactcagagcatgattgccctgggatttgacagcagggctgcacttcatcattctgggcagctcacatctgggaattactatcagaaaaatatctttgtgctgtgtcccttctttctcactgacatctgctttggaggggagatttggatggagtaaagtttctaagcaagtgggagaaggcctagaaatagaacacttcaaagtgcaggccatagtcgtttctcctgatatataattgattttagaagatttaagctttttcctctctggaagctggcaccagttttctccattatagaaaagctgcggctctttaaagggatgtagaaatttactttgactggaaaatatctgaggagagaacagctagtcttcaaagtaggaaaaccatttgtcaaacgttcttgtgcctcctacagggtaacacggagctgttgacagtttcctcctttctcctacagccaagtcaggcaggcattaaaggacaaacatggtctctaaaaagaaggctcaacagaaagcttgggtttgtgaaaagaaaagaaaatattggaaccccaaactcactatgccaaagggaaaagttaagctcgggaactgagtcatgcaaaaaactgccttgctttcgtttctaaacagataacttcaatgtagaagccaccaatatccccaggtggggatatccctcaccctaataatgtaaattaaccgcttatcttcccaggtagaggacaaagacaagaacagaaatcatcccaggctgggcgcggtggctcacgcctgtaatcccagcactttgggaggccgaggcgggcggatcacgaggtcaggagaacgagaccatcctggctaacacgctgaaaccccgtctctactaaaaaatacaaaaaaaaatagccgggcatggtggcgggcgcctgtagtcccaggtactggggaggctgaggcaggagaatggcgtgaacccgggaggcggagcttccagtgagccgagatcgcgccactgcactccagcccgggcgacagagcaagactccgtctcaaaaaaaaaaaataaaaaaaataaaaaataaaatagaaatcatccctctggccaccctgaaacaaatgcatatttgacttcttcctctactctatatttgttatcttacagaaaatgcagatttactgagtgccagataaattggctgttcctctttcccctcctgcctgctccgtcccctttaaatactgaagtcctcaaaaccctctttggacaacacaagccacagatctgtagtaagttgtttctctttttcctgggtgtgttctcagcctttgcacaataaacctctaaatcaattgagacctgtcttagacacttttttgatttacagtttttgttgtttgaagatgccttggcttgtcctccctcctaagatttgctggaatctgactactttggggtagtcttggagcttctgctattaaacccttttcttaaaatgtgctagggctgcctagttgctcttctatgtaaagaaaaacgtctctgaaagagtgtgttgatttgaaaagtatattcatcatattccaggaacagcttacattttcccacactttcatccttaaataaaaagttggctgggtgcagtggctcattgcctgtaatcccagcactttgggaggccgaggcaggcggatcacgaggtcaggagatcgagaccatcctggctaacacggtgaaaccccgtctctactaaaaatacaaaaaattagccagacatggtggcaggcgcctgtagtcccagctacttgggaggctgaggcaggagaatcgcgtgaaaccgggaggcggagcttgcagtgagcccagatcgtgccactgcactccagcctgggagactttgagactccatctcaaaaaaaaaagttacaaattaaggcatcatacactcataattgtcaatagaatctatccctggcgagttatcaaaaatatgggcttagcagtaacgtcttaatcacaaataacttttcaaatgtacaaagaaaatcttttttctctgactcatacagtgagatacaaaaatcaaattggtcccttaagataggattagagttgataagatcatcacccttagaattaggaggtaaacgttttagacctggaacaaagttagcacctagtcgtgcaaataaagaaaggactctagagtagagagaacaatccagggacttcctgggtcatttatttatgaattgacttttgacccttctcatcataggctgtgacctattcttaaagtttgatcttttttcagtccttttacagcatggcagtatttccttaagatctaccaagaatcctagcgagacttaattctgttagcctaacaatatgagaaattcagaaagttaagcgtacttacttcctggacttttacccctgtttcctattctctagtccccctcctgaaattagtgctgatcagaacagaagtttgaagaaactacctgaggctggagaaagtagcaccagaaaagagcagaaggaacaatcctcagagtaccagccccaacaagataaaattcactatgtctgacattcaaaaaaagttatcaggcctgcaaagaaacaggaaaatgtgatccataatgaggagaaaaatcaaatcaataaaacagatcaagaattatacagaagatagaattggtagacagagacattaaaacagttcttataactgtattccacatgttcaagaagctagaggaaagattgaaaatgataagtagagtcatggaagttattttaaaagatctaagtctaacttctagagatgaaaaatatggtatttgatatgaaaaatacaatggataagattaacagcaaattaaacattgccaaaggaaagactaaataacttgaagacatagctataaaaacaataagaaatgaaacacatagagaaaaaagactttaaaaagagcacatcagcgagccttgagacaacatcaggtggcctaatatatgtgtaattagagaccccaaaggagaagggagggtacagaaaaaaaagaaataatgaccaaatagtaatgagcagataaagacccaaaatttttcaaatttgatgaaaactataaacccatagacccaagaagttcaacaaaccctacatgggaagcatgaagaaaatgacaccaaggaactttataatcaatttgcttaaagctattgttaaagaaaaaaatcttcttcatctccagtgccttaggttaggtcctcttcatttcttagctgaacttttacaataatctccaactaattgccctgcctctaatataattccccaccagtcttttcctcttcaccactgttagagaactcttcactgaccattgactaaaatccaggctcttagcactgcaagtaaagctttgttagcatggcatatgtgacccttttcactctctccaatctcggcaccctatcctccacatctgttcccagtcctctaaccacatggtacagttcgtggaaagagctgtactgctctggcctctatgcctttacatatgctattgtctgtctggaaatgtccttctcttccttggtttattaatctgtggcccccactaatctctaagctcctggaagacgacagactgtctctttttcactgcagtgttgggctgaaaaaggaaatagagtggaatttgagaaggggtgtggaaggcaggaggagggaagggagaaaagaacaatagaaaaaacaagactgaagagcttagccaaagtgttctatttccacaaagaaggtaaatatagaagagagaaggccgggcatggtggctcatgcctgtaatcccagcactttgggaggccgaggcaggaggatcacgaggtcaagagattgagaccatgctggccaacacggtaaaaccccgtctctattaaacaatacaaaaattagctgggcatggtggcatgtgcctgtagtcccagccacttgggaagctgaggcaggagaatcacttgaacctgggtggcagaggtcagaggttgcagtgagcccagattgcgccactgcacttcagcctggcgacagagcgagactccgtttaaaaaaaaaaaaaaaaaaaaagacagagagaaaagatgggcaaagaggtgtaacgaagaggtctagtagaagggtggggcttgaacacagggagtgactcctcttttagtgagttgaaagaaagaagtggaggagatagagcttaagggaatttactactggcagtttcgtttccttcctaaagtaggagacaaggtcatgtgctgcaaagaaggcttgaggagaatggaaaaggctgtgacatagaataaccactcacattcaaaacagtgtactgtgatccgctgaagacttcaaatcagagctgaaaaccaggacaaaatatatcctgtcctcctcctaaacataccctacaatatctcctactggctcttccttcccttttataaaaaaccatctgcctagactctctagacagatcactgcctttgattctgagtatggggttttctctggaggggaaccggaaaatgtagcaaaacaagagtaaaggaggagggcaaaatatgaagagtgctcaagagtaggttatacacattttagaagtacagcgaagatcattaaaatagcccaaaatctggtttgaacctaaaggtttctaacaggtacagggaatcagatgtattctaatgtgtcagttgacaaatttcttggcaatttaccttcagaacagtgggagagatctacagctaacatattcagtcattcttggagggtagagggatctctctgcaggggtattattttaaaatcaaagcaaaatatctaacagaataacaagtatctgtaatgaaaaaatctccatttcaaagcgttgcttgaaatgaaagagacattttattagattatttatcagagagtggtctgaggaacaactgcatgatggggttgagggtgaggcccaggggttgggtctggacaaaaatagagattattaacattgcagtttcttgaatcccatgtcagatttactaatttagaatctccaaatggcagggtggggtacgggagaagcctagaaatctaaatattttacagatgttccaagtaatttttaaacattttattatggaaaattttagtctcacacagaagtagagagaatagtacaattaagcccattcacctaccacacaacagggggccgagttaggagttggtaagcaaagtattgataacctgtgcccaagcgaacaaagtaagtggtcacctatacaatctgctactccaatttgccttatatagttgctccaaaagtaaattgcctctctaaaagagaaaatgtagttataactacacattcttttatgatgtaaatatatcctgtctttctatctatattctataaaatgcaaacgtagcaaaaattctttgggaaggtgaggagctgaatgattctgaatagcaggtctgcatcaatttcctaattaatggccacatttaaaacatttaaaaatttttttaattttagaggcggggtcttgcccaggctggtcccaaactcctgggctcaagcaatcctcctgcctcagcttccctagtagctaggactacaagtgcaactatgcccagcagttaatggccacatttaatttaataaatattattgagcacttactgtggccagcttatgatgcaagatctaagctgctattacagagagaccaaaaaaaaacaaaaaacaaaaaaaaccagtgacttaaacaagataaatgtgtatttcttccttacacaacaacatgaaggattggcattccagcaaggaaaatggatattgagggatggttagcaatctctgctgtaccaactttgtacaagaccttgtggtgagcccagagcttatggaccctggagcgtgtacaaatttggaggccctctttaagtaagagaatatagaattatagatacaaaattaagtacagaaaactgagcaagcaaaggtctttaaagctaaattagctttacagtaaatctagctctgagtgggtttctgccatccagtcaggatttgcctgaaaaagacaattagaggccaggttcccagcactttgggaggctaagaccagcttgaggccaggagtttcagaccagcctgggcgagaccccatctctacaaaaaaataaaataaaatagctgggctaattggctcatgcctatagtcctaactacttgggaggctgagatgggaggatctcttgagcccaggaattcaaagctgcaatgagccatgattgcaccccgcactccagcctggatgatagagtgagaccctgtctctctctctctttttttttttttttttgagatggagtctctcactctgtcgcccaggctggagtgcaaatggcacaatttcagcctcccgattcaagtcattctcctgcctcagcctcccaagtagccgggacaacaggcatgtgccaccatacctggctaacttttgtatttttagtagagatgagatttcaccatgttggccaggctagttttgaatttctgacctcaagtgatctgcccacctcggcctcccaaagtgctggtattacaggcatgagccaccacacctggctgtgagaccctgtctctctccttttttttttggagacagagtcttgctctgtagcccaggctggagtgcagtggcccgatctcagctcaccacaacctctgccttccgggttcaagcgattctcctgcctcagcctcccgagtagctgggagtacaggcgcctgccaccacgcccggctaattttttgtatttttagtagagacggggtttcaccgtgttagccaggatggtctcgatctcctgaccttgtgatctgcccgtctcagcctcccaaagtgctaggattacaggcgtgaaccaccgctcccggttgagaccctgtctcttaataaaaataaaaagacagagatctatataagctagtgttttgtcatactataattgactgaagtgcctgaaataagtgccgtgtgcagtgacagtcctgggtagtaaaagaatttactaagacagaaataaaataacagaagcggctgggcgcggtggctcatgcctgtaatcccagcactttgggaggccaaggcgggcggatcacgaggtcaggagattgagaccatcctggccaacacagtgaaaccccgtctctactaaaaatacggaaattagccgggcgtggtggcgggcacctgtaatcccagctactcgggaggctgaggcaggagaaccgcttaaacctgggagggggaggttgcaacgagccaagattgtgccactgcactccagcctgggcgacacaaacagactccatctcaaaaaaaaaaaaaaaaaaaaaaaaaaaaaaaaggtacaaaagaaaacagaaggaaatttattaggggaatgctgctttatagcagcaacaggcagtagtgagagagctgctatctgccaagaggcagaaatgtgacagggttttttgttttgtttttttttttgagacggagtcacccagggtctgtcgcccaggctggagtgcagtggcatgatctcggctcactgcaacctccacctcctgggttcaagcgactcttatgcctcagcctcctgagtagctgggactacaggcactcgccaccatacctggctgatttttgtatttttagtagagacggggtttcaccatattggccaggctggtctctaactcctgacctcatgatctgcccgcctctgcctcccaaagtgctgggattacaggtgtgagccaccacgcccggcaagagggttttataggacagtgttggagagatctatgtacaagtgagcttgtgctgtatactaagaatacgtggcagtaatttttcactgccaggcctttcctcttcaggtgcccaagggaaacactctgctgttcttagccatcttgcaaccagcatgcctttcatttctggagttgcaagatagtggctgcggtttttccacaccctttaaaggaattacaaaccaggttaagtccctattccaccagcctggttccttcctggttccattaacttattgatttattacggccccacagtgagttcaaaatattttgctatactaagagttatggatagtcacaaaagcttgagaaaaaggagaaaggatgtttgttggagttacccgtaaaggcatcatgaagaagctatagtcagacacttaaaggatgggtaggacttgaaaaggcggaatgtagggaagaggctgatgaggaatccacatatgcaaagttctgaaagcaagaatgagcagaccacttgggagatgggaggacatctggactggaactagactaaatgttgaaaacaatgaaagattcggcagagacaaatgatgaaatgttctgccagagtgaagcatttgggtttgatcagatagatcaggggttggtaaactacatcagcaagcaggccaaatctggcccaccccgttttttcgtaaataaagtattactggacagtcgtgcccacttgtttacaaacctttgtggctgcttttggacaagtagagttgagtagctgtcacagagaccttataactcacaaagcctttatagaaaatttgatcaaacaacaagacaatataaaatcctctaataaggaagagaactgaagttttattggagaccatttttcaaaatctgatatatttacaacttcctaaagctccaaagcaggtttagaaaacttcaatcgaaatattttctgggccgtgcgcggtggctcacatctgtaatcccagcactctaggaggccgaggcgggcggatcagaaggtcaggagttcaagaccagcctggccaacatggtgaaatcccatctctactacaaatacaaaaatttgctgggtatggtgacacatgcctgtaatccgcgctacctgggaggctgacgcaggagaatcatttgaatccaggaggcagaggttgcagtgagccaagactgcgccactgcattccagcctggcgatggagcgagactctgtctcaaaaaaaaaaaaaaaagaaatactttcctagtttgcagagactgtgccttaaggcataatttaggttgaaatgaatctcattgttgcgcttcagcagttttgcatcattatttgtttttctctggtgtgcctttgtttcctaatatttcacaaaccagttgggccaattatcttccacacaattaaaacagtttgtgccatccagctgtttctccttaatcttgggcactttacatgatgctgtttgccctcctcactaaagctctctcattctatggtgggggcactttcaaattaacattcccggcaaactttttgcagggtttaaatttttctgagcaatatcttctcccctatattgacagtccatgagcaccctcaggttcaataaagtgttccttatactcattttttatttcacacatgaacactcagcagaagaaacaggtaagattattatacctaggagagttgtacctaggggaaaaaatgtaacatttaagatgattgtcacatttaagagggtgtctagattcttggcatcttgaataaagaattggacaaaatgcacaaacaaagcaaggaaggaatgaagggatttattgaaaatgaaagtacacactccacagtgtgggagcaggtacgagcgtaggggctcaagggccccattacagaattttggggagtttaaataccctctagaggattctattggttacttcaggtatgccctatgcaaatagagaggatgaagtaaagatacaaagctatttacttggcctatgccctatggagaggatatttcctgtcctagctgaagtgggaattggccttatgttccctgcctctagaccctattttcctgcctcaatgattacaaaatgttccccctaaaaaaaactttcatttattgacatttgtgcccccagattcccacaccttcataatcaattaatgtttattgagatctttcttttttcttttttactttttttttcccccaagacggaatcttgctctgtcacccaggctggagtacagtggtatgatctcagctcactgcaacctctgcctcccaggttcaagcgattctcctgcctcagcctgctgagtagctgggattaaaggcgtgcaccaccatgcccagctaatttttgtagaaacggggtttcaccacgttggccaggatgatcttaaactgacctcaagtgatctgcccacctcggcctcccaaagtgctgggattacaggcatgagccaccgtgcctggcctaaaaaattattcatggaaccaggactccttagagaaatggttaactcaatgaactgattgaacatcccaaatccaaaagccaaaatgctccagtgagcttttcctttgagcttcatgtcagcacttacaaagcatcagcttttggaacatttcagattttcagattagtgattctcaacttgtatcaatcacttgatcttcctcgtcctttggtaaacaagccaaaggtcccatataggatgtctctgaatttcgccgaaaaactgggttgccaatgttgatggaaatgtgaaaagtgaatgggactttccaacatatagaagtatataatagcctgatatattggaaagagcactgggaaagacatcaaaagacacccaactatacttcacagttctgccactaactaatcacttaattgctttaggctaaatttgttttggttttttaaaaatatgtaaaataaaagttatatactgtattatctccaagaacttttttttttttttttaaacaaagtctgtctctgtcacccaggctggagtgcagtggcatgatcatggctcactgcagctttgacttactgggctcaagcaattctccccacctcagcctccagactagctgggaccacaagcatgtgccaccacgtctggctaatttatttattaattgtagaggcaggtctcattatgttgcccaggctggtctcaaagtcatggcctcaagtaattctcccactttggcctcccaaagtgctcaaattataggtgtgagccactgagccctaccagagctcttctaataataaagttctgtgaagtagaaatgaagataaaattggaaatgttttgcctagccaaagtccctatgcccaacatggtcatatgtgctcaaggatagacaataaaaagtatttagagtgcttatctatcttatttatccatagagagtgaacaaagcctccctggcttaggaatatctcctctggtgtctggagagctcctggagctatgaaggaaatggcaccaggagctccagaagactcaggaaagctttcaaatccaatgggatgactatacaggtcagtaaaagaaaaagtacagaggaaagaaaatccttttgtgtgtatcacattctgtgctaattactttatataactatctcatttactctttgcttatgatgtaggtttactgttcccattttaaaaacactttttgcatcaatgagaaactgaggctctcagagtttaaatgatttggaagtctgtgcactgtccatattccattccatctctgtccagagagtcaaattctttcatgaaatatttctaccccttctgcagaaccttctctgaccattctggcccacaatgacttcttcttctgagcttctctagtgcttattacctgtaccaccaatttcacagctgtaactctttggaacgttgcttatatttgatttatatatcaatcagtaagcatttattgaacaaccaccatagaccccctaggcagtggggatacacaggtgaataagacacagcccttgaactcaggagttaaaatctaatagaggaaacaacaccactggtagtgaataaacaccctgggctgggcacagtggctcacgcctgtaatcccagcactttgggaggccaaggcaggcagatcacctgaggtcagcagttggagagcagcctcgccaatatggtgaaaccccgtttctactaaaaataaaaaaattagccagatgtggtggcgggtgcctggaatcccagctacttggggtgctgaggcatgagaatcgcttgaacccgggaggctgaggttgcagtgagccgagatcatgctattgtactccagcctaggcgacaatagctaaactctgtctcaaacaacaacaacaaaaaaaaaacagtttataaacaccccaatccattctaagagtaaatcactttctctacttctctctcccctagtttggaacacttacatttcagctctcattatcataccaataagcctgaaagtagcaaaaccaagccttcagggaaaaggaaaaggagaattttaactaatgaactactgcagcaaataccctataagccccaaggacaaaacacagcagaggtaacaactgtgttgttaccttaagttgacttaaaacttaaattctcctaagggacagtgcttttcccaggcaaagcaggcagacgggtttccgccaaagtctcagccctgtggcaatatacaatggcgggtggggccaggcatggtcgggggacagaggcaggaagaggattacttgaggccagaagttcaaagaccagtctgggcaacaaaatgagaccccatctctactaaaaaaatgaagagaaaaagaaaataatggctggtggcacactgttgtcttaacccactccatggagggaatcagtgaggaagagtctcactttctggtaactagggatggctttaggaataaaactatctattccagcccttattctaaccagctatcctactaacaacacattcctaagctagtcttccaatgcaatgataactttctaaaagataatgaaagcccatagataaaagttatatgaacaaagcccggtatatagaaaagatagtgctcggccgggcgcggtggctcacgcctgtaatcccagcactttgggaggccgaggcgggcggatcaggaggtcaggagatcgagaccatcctggctaacacggtgaaaccccgtctctactaaaaatacaaaaaattagccgggcgtggtagcgggcgcctgtagtcccagctactcgagaggctgaggcaggagaatggcgtgaacctgggaggcggagcttgcagtgagccgagatcgcgccactgcactccagcctgggcgacagagcgagactccgtctcaaaaaaaaaaaaaaaaaaagatagtgctcagctttggtttcttctcggttcttttggtcagtccggatcttgctcatcaacaattttaagttccattttttccttcagtttcatgtcctttgatactgaatcaattcaatttgatttaatgaacaacttcaacatgcaaagcaatatgtacttaagagaataaacgtgaagaagagacgattcctgcttcaaaagttgatagtcacgtaaattattatccataatatagatctggaaatgtcatgttcttgtgacaactacttatgctcttaagagccgtatataaaagccatgtatatatgtggctgagcttattccaccccatactgtaagattaaaatcattgccatcttcaaggttctgggctgggctatgttaacaaggagttctggtcgtgcctactgagagacttgtcccagaaatgaacattgcaagcattcttgaagtcaaagaatcacttggtcttatcattacaacctaggatttgaggaagagaaacaccaatccctgtgactatctacagtatccaccccacgtcctttctagagttgcccgagtaatatattcttcaacccaagcctcatcctgtctactaagcaagaggtaaggcaggtaaacagatttcctctaaaatgtagagggtagaattaagggaagtgaaattcattgagcatctaccatgtactatacatatcgtagcttgtttaaagctcacattagcactgtagagtaagtctcattgcccgcattttacatcttaggaaagtgaggccaaaagaggttaaataacttgtctgaggtcacggctagtaagtggcaaagccatgattcaggcttggagattggtagcagatggagttctagttcagaaaattttttggatgctggctctaccagagctttaacacggctaaaagacatttcagattatcaaagtgctccaaagccatgggcaggaggcccccacacagcaagctctactccagggaacttcagactctgcctgaaattcagttgcaccaaatgcctttagtctccacaatttaatttttgcaccgtaatttcaggctgctcctgattagaaatgtgatagctcaggtgccataagcaaaagaactcacaccaaggaaacccttgctgagttgtcagcaccctgggtggtaggagtcctgagagacagaaggtcatggagcaggaaaatatagagtcctcttagacatgaaagcactgaagatctgggaagccaggcagagtggtcagagggatcgccccacagctggaagtcattaatagtccggggttgcataaaaagcaatgtgaagggagtgaacagctttggtcaggctaccaaagtcgctggtagcctggaccctgagttcaccgatccttcctactcagtaatatctacaggtaagtccaaagggaaattgctttgggaatctgacaatttaactctgctctgctgatacaaggatgtcatcaccaaagctggaaagaaaatgggccactgatggtgacatgatttaataatgaggccagttctcatttttctattgggagcttggtaagaattctctagacagtagacaatccacaattcacttatatttgactttggaatttggggtagctttggcagcagtaggttgtttttgttttgttttgttttgtttttgtttttgagatggagtctcgctctgttgccaggctggagtgcagtggtgcgatcttggctcactgcaaccttcacctcctgggttcaagcgattctcctgcctcagcctcctgagtagctgggactacaggtgcgtgccaccacacctggtggcacctagtatttttactagagacggggtttcaccgtgttacccaggatggtctcgatctcctgacctcatgatccgaagcagtaggatttaacttcctgattatgtttaacttgggttgaaaactgaaataattagtagtctttgggaatgccctgattgatcaatgaggcacaaaggagaaccaatcaatcagtcacttagaacttgccatcagtgatccacaaaggggtgtgagagtcataaataaataattctggtggtagtcctaaattggttcttttttttgtatttggtcatagcactaaactaggctgggaagaaagattctcggggcagaattctgaaatctttgccttagctgtgtaactgttcagagaggaatttcttttcaacttgtcttttcctttggcctctaaagttcttctcagagaaaaaatcaatcccctgctccaggctagggccaagtgtgtaaggtttgtcagtttaatctctgtccacaagcctaatcactttaagctggcctgtcctggggctgagaatctactgacggtgttttcgtctttctcttaggaggatcgtgaatttcctaaactgtctttgagagactcagatattttattttataaatggcagtgacagatgttatgtatccattgctaatgttatctgtacaaaatcaagaagatatattacagtggatacaaacctagagtgccttttggatatggcaggtgaggagtgttccttgatggtttgttttcagttcagtgcaagacactcctgaagcacatcacttactataaatgacctttaagaggaaaagatactttggagttactctatcacttgaaaatggggcaggaccattacaagagtaaatatagttatttatgaaaagccagatctccaagtccaaaaggagagaaataactattattcatatagttcagtccttagaaccaattctcctctgctgtgtatggcatttccacatcttgtttagacttcaggctgagcctgtaattgtttggctgtgggaaatgagggagtgtatttcagaaaacccatcttcccctcgcacttccagggtcctattcagatcgacttgttctgctaccattttacccatacccagcatcccgatatttattgagcatatttatgtgtgccattctatcctagttcccaaaggggatacaaaaacgaaattatacgcaagatggtagagcatttacacaaaatcgtaaaggaggtgaagttggccagtttagttttttcagtttacttggggaactcattagcctgctttcagcccttttgtctccgaaagcttagaacatgtactgctggtggtatgtgagatggtttaagttaaacagaagatgactttaggcggtagatggacaagcataagattatcacatcatggaaaagtaatttcctttttaatttgctttcaagcctggattcatctagaagaaagtctcagtgggggttgatgtgtcattaacatattccaaaacttattcccttttaacatattcctttttaatcaagaaaatagacctcagaactggagtgctctcctggtaacagtagttatttagaatttattgacattgtattattaattttttctaggattatattctgtttatgaaaaatgacagtaacatgctataaattttccaatttacacgaatgtatttaagctttgaaaaagttattagttgatttaaagaaaaatattgagtaaataataatatagctgggttggagatatggttgaaatcctgacattgctattcaaatgactgaagtttgggagacacttctttcccccacccggagcccaaacaaaattactatttgtgacccattcctgccctctgctttacctaaaccaattcaggatcatgataatgaccaataatataataagaaccatacttctccctataagcattatgatagggctctgagatctttaacctaaagagtcattttaatggtagaaatttctaaaaagacaggataatatatttgtagtagatgaaactgtcacaataatgacactatcgagtgctgtcatttagactttttgagtattctctaattctcacaacgaccgtgaggcatttttcagatgagaaaactgaggttcagggaggttaaacaaaacctcaagcaataaggagcagagccacggtctggtgcctagaacttctggccatgtgggtagcttaactgctccccctaaggtttgttttcttttttttgagatggagttttgctcttgttgcccaggctggagtgcagtggcgtgatctcggctcaccgcaacctctacctcccgggttcaagtgattctcctgcctcagcctcctgagtagctgggattataggcatgcaccaccacgcccggctaattttgtatttttagtagagacggggtttctccatgttggtcaggctggtctcaaactcccaacctcatgtgatccgcccacctcggccacccaaagtgctgggattacaggcatgagccaccacacctggccctgctccccctaagtattaggcaaaccctggagaagccacacggatgaacagcctgaggaactcaagggagcatgtgaataggtgcacaataacacattataacacagggaaactctgaaatactatgggaggaagtacgttcagagtaggtgagaccaactgaaggaagtggggactctaccaaaggagtcacctcattgcatttatctctgccttgcattctacccctctgccttacagacctccttgtagggccaggtcaggcttcatgtctcccaccaaccccagtcactcagaaaggagcaagtactctggttgccatatttctgtctctggaaaggatgcctgtcttcccagttgggaagaccattcctcagctcggtccggtggactgctgcctgtaggacatgcagaggcaggcaggctgcatctgcttctggagataagctcccgctgcagagcttttgtcaggttggccactgtcccgcaacagcctttctaacccagcgccatggaccagctatgctcttcaccaatagcctaggcaagagcttcaagtgctcttaggagtcattccgtgtgatgctaacctggggcttcaagcctaccattgggaatcactatcccttgtgacactgtgtccaggccccacctcctgcctgtccgatagattggatttcttgcagtgttggcatcatcccagtcacacctcgttttaccaggtattttatagaacctcccagatgagaattaagataatgagtatgaaagataatgagtatgataatgagttgagaaattccaaagccccagaaaaatacataagatgatatcaccaaacctttccgcccactctagagtgtagtccttggaactcagcccttgtcactattcccattttccctgggtgatctcatctgttcccctggttttaattactacgtatatgataataacactcctatctgcatgtctagtttagatctctctcctgacctttagatttttattttgacagattcctagatatctatatttcagtgtattccacagatacttcagagtaaacagaactcacccccttcctcactaaggcttcctcttccttcggaattctgtatctcatcaaggtttctgatgagtctccaaagagctccagccggaagaaacacacacatcccatgcagtcttttctccataccaagtgcagagctgagctctggtgtggccaccgggaggcagtgcagacttgaggatgtgtttcgcagcaaggcttcaggagccccaatcctgagcaatcccagtcctgcatgcaacttctgcccagcttcctttcctctctttttcagggaatgtctttgtctgagtccaccattgactcaggctcctattgaattggtaagggagggactggaatggggcccaagtgcaaagctccttcacagagcagcatgcacccccatatgcacatatcctggaacactgcctgccttcagctcctgagaggcacagttcaacaaatcaagctggaggcttctttgagccaggaaacctaaaagactttaaaggaaagtgtggagcctggtgttaaacaggtattactttgttccctgacatacaggtggtggaaatgtcacatttctttaattttctaaattaaatacccttggcttccatccaacaatgagtagcaaatccaatcttggtcctttatcaggagcttacacatactggggggaagatgtctcttagatgagggtgcctgtcacccctggcgctctttgcccaaaacaattctacgaccctttctccaggtttctctatggcatgaagacctctgctgaggctcgggatcagcagtgcctttgcttacctccctgagcacactgtcatccccattgaaggccctctggtcccagcggtctgtgggaggcctggagcaggacctggccacaaaaggaggctgcagtgctcctcagcaccatgcctcaaagccaggctcaggaaattctcctctgccctcttctaattctacaaatccttcctcctctcagacaaaacagttttattgcctctaagactgggttaattttttaaaacaaaagcttgttgatttctttcttcgctttatttccttccctcccttccttccctccctctttctttccttccttcctctctctctctcttttttttttttttttttgacagagtttcactcttgctatccaggctggagagcaatggcacaatctcagctcactgcaacctctgcctcccaggttcaaacgattctcctgcttcagcctcctgagtagctgggattacaggtgcccaccaccatgcccagctaattttttctatttttaatagagacggggtttcaccatgttggccaggctggtctcaaatccctgacctcaggtaatccacctgcctcggcctcccagagtgttgggattacaggcgtgagccactgtgcctggcctgatttctttctttttttttcttttttggagatggagtttcgctcttgttgcccatggtgcaatggcccgatctcggctcaccacaacctctgcctcccagattcaagtgattcttctgcctcagcctcccaagttgctgggattacaggcatgagccaccaagcccaggtaattttgtatttttagtagagacggagtttctccatgttggctggtctcaagcccccgaccttaggtgatccacccaccttggcctcccaaagtgctgggattacaggcatgagccactgctcctggcctctttcttttttgaaacagcgtctcgctctcttgccgaagctggagtgcagtggtgtgatcatagctcactcctaggctcaagtgctcctcctgcctcaacctcctgagattatagacatgagccaccacacgcagctcaatttcttttctttgtttctttctctttttcctttccttttttttcttcttctttttttttttttcctgagatgagagaaagcctgatctccagaacaaaaagccctggttaccctttgggattgggagtgtggaggaagataggaatggtctattcttttgtgaagaacagaaatggcagacactacagaaaatcagtcaatttctcaaccaggttaccctccctgcactaaagtggtgcttacctcataccttgttgccaaagtttggggcctgcctcagattggtgatgcatcagattggaagtaagcagcaaacttggatcccccaagctttaaaacatttaaaaaaattttatggatacataatagttgcacattttataaggtgcatgtgatattttcatacatgcataaaatatataatgatcaactcaggataattgggatatccatcacctcaagcgtttatcattgtgttaggaatactccaactctacgcttttattttgaaatatgtaataaattattgttaactatagttgcccttttgtgctacccaacactagatcttattccttgtatctaactgtatttttgtacccattaaccaacccctctctttatctatctgtatagtcgacaacttccagcttctccagaagtggcaaataactttccaactgggtatccacacagaaatatgtgagcatgcttacatggcatgtgctgccccacctccccctgtgaggagcttggttacagctacagcatttctacaacctctttaaaccaactttgtagtatccggcagcaaagtatcattccctgacattcgagtcattgagtctctgaagacttggaaaagggataataagccaaatcattcaggaaccagggggtcccagagaggtatgtaataaatttcatccagatgttggaattggcctttttttcttccatctttttttttttccagttacattaaaaaccaaacacattgttgttatcttatcaagcaaggtgggaagaacattttttcctttatttctaggtaagcctgcacaaaggattgaaagggctaacagcatatgggtaatacaggatctgcattattggacatctgaattattggagagtactttgtacatgacagaattatccagataggtaaatggtgttgcaaacacttcaccaaaatccaactagagacctctaagttcattttaatgtacagcttccaaactgtttatctgcagtgtaggcagcccagtctgttttaaaatccttctaggaaactatggccgtgcaaatcagtccaacaaatagccaaatgtgcatgttactctgttagaaagggaaaagtagatgcaggcataagtgcaaatttttatctcatggcatccgaggaacctaaatgtctggacagctttgttgtgccatgtggctgacaaccaggttattagataactcacaaaactcttctccagcagcccagagtttcctgaggttacctcttcccatgggactagaatgaagaaaaaagaaaaacagatatccccaagctgcagccacatttaatgtcccctttaccccacaattgaactcctgctccctggaggaaaaccctaaataaatataccagtggcagcagagagggattatttttgatagtggctgctcctgactccaagctgtgggcactgaactagaaagcagtgctgagagagagaaccaggaataaatgacactgggaaatgggaaacccagagaagaaaaaaatcttactttcttcccctgaaaaagatgcactttgcaaggttcatcttttcatcttttaatctggtgagtctcgaaatttttagtctttagactacttaagcagaacaagagtctcacctatttactagattaaataaacaagcaagcaaacaaaaaacacccttgaggtgtttttgctgaatcccttgtgattatttatagctcctttcaaaaatatttgctttggtgcatttaaattttatttcaaatctgcagtggaaaatctgtttcaaaggaaaaaaaaaaaaaagaaagaaccacccaacacgcttgcatttcgactcagcccgctgaacgcctggaagaaattttgcagacccaccagagatccccagattccacttgtaaaaccattgatctaaaaactacgtcttgacttcagaacacttcttttgatctggaattatctattattgaccacagagagcagccactgacgatttcctggaacagggccctgtatagagagaggtgagctccagggagggaagaagaaatttctttcgctttctgagcgggtgctttggtacagtacaatatctatgctatagtaatatatctatgggcttgacttcttcttctcctcgttttcctctttctccatccccctccttcctcatctccttattttttttgtttatttgcttcttctatagtaaaactttctgaaagccaatgtgcctggatgatttttgcctggtacattctgctaattggagtttcagaatcacagtttcttgcttgggtgcagaattttcaaaagtgtttaagtgcctaaattattgttgtagttgctggccactgcccatgccttgtagacaggcagctgagaaggtaccagaaaaaaaaaaaaaggctgcaggtctgtacccttcactgtaccagaatgcagagccctactgagctgtaggaatgcagaaccctactgagctgctcctcatggaaggagcagccatgttgtactgagctgacaacacgggcaatggaaagagcaaacccagggcgtaaatggaaccaggccctggaagcgtttggttgggagtctcccaactgagctgagccctgagaataagatggttcctttggccaagtggctctgtgaaaatgaggaagaatctgatccacgatgaaggtaaggagtgcatctgtgtctcctctcctcaagccacagggatctcattaaggatcagggcacttacgctgatggcttcactttaggcacaaccctcagcaggagggccccatgcaaagataattaccaggaatggtgggcccattacagccctttgatttggtcactccaacatactgttagacagatgtaagaaagctgaccgacatttacctaaaagtgacaaattgcaggttgaaggatttggtttcagcctctggcaggttggggctttgaaaaaacagaatataccagactcttgctttggagctcttgcaaattcaagtacataaggacagatatagccaaaattgagacaattacctttttttttgttttgttttgtttgttttttttgctggagtagctcgagtgaggaacaattacttttaatagtctattttactgtccagcgcagtaacccccataacccccatatattgtaactggctctgggttggaaggcagtctgggaaagggcctgtttctgcttctttgagacagcctgcaggaaacttcaaagttaaaataacataaaacttgccatatcttggttccactatgagtgtttctcttccaagcacttctgcctatgggtaagcattctagcaaagatgccattacagtccggcacggagaaataaaaggagccaagagttgggcaaaagagataaggaaccagagccagaactctcattgaaaagggagatttcttttttttttttttttttttttttgagacggaatcccgctgtgtcgcccaggctggagtgcagtgacgtgatctcggctcactgcaagctctgcctcccgggttcacgccattctcctgcctcagcctcccgagtagctacaggcgcccgccaccacgcccagctaattttttgtatttttagtagagacggggtttcactgtgttagccaggatggtctcgatctcctgacctcatgatccacccgcctcggcctcccaaagtgctgggattacaggcgtgagccaccgcgcccggctgaaaaggaagatttcttatagaaaataggaaacaaaaagttcagatgtctgggaggagatgcgggcgggacgtcatctttgaaataaaaaagagtacgattcataggggaaatgtacacaaagagactgtgagttgagaaaaacctgacttgtgttggggagatttattcagattttgggaagaaattggaaagaactataaagctagagtctgtaattagttcccatacctgcgtagccggttctgaggggtgaagtactccctagagcccttagaggtctgcattttgctcacagggcagctgtcttgaggaaaaagatgaagaatgggagtgttatggagggcatacgcccctctgatcatcaccacaaaggtaggatccagctataaattgcctgctagagagtcaccagttccgtctccatctgttccccaaacttgtgcttatggatttgacattcaggtatttttcagaagaatcagcttgaagcaaaaatactgaacttaaacattctttttttttttttttttaaattcaaacccacaatttgaatcttgtttaaaagatggaaggatgagaagtgtgattctcttggcttgtttagaaatagccatagcaggtcgggtgcagtggctcacacctataatcccaacactttgggaggctgaggcaggtggatcacgaggtcaagagtttgagaccagcctggccaacatggtgaaaccctgtctctactaaaaatacaaaaattagccaggtgtgatggcgggtgcctactctagaggctgaggcaggagaattgctggaactcaggaggcgggggttgcggtgagcagagatcgtgccactgcactctagcctgggcagcagagcaagactccgtctcaaaaatagaaaaaaagaagtagctgtactagacgggatcccaggtcttacgcattttcactcttccttcgggttagcctcctctcaagtgccttcaggacttgttcaatacagtcagtaattgggcttttagaaagaggaaaagtatttatgtaaaattgcctccttatgtcctgtagctacaccccgtgtgcatccagggaagtgtacgcagtgaccactgagtgggtatccgcttatttcatggtagaactgacttaaagcagatacctagtccttggcatttctataagttagggacaaatttctcatcctcagcattattataaattagggacacagagaaaaacttgctggctcctagtgaaggcattcattgcttggaacccagactccgcaaggtcatgcagcctgacaactggctgtagtgcaccaagctcataatcaggaattaagagaccagagtcaggcttgcatctgcgtataactacctgtgagactttaatctacatattgaccgcctcaggggttccatcttcctatgaatcaaatgggaaaacaaagactcacctcctctactagcaagaattcttgtagataccatgacaggttaaaagtatttgccacagctggggaagagagaatggggtcagacccttgatgttgtggtagctgacttttttacttgattgcttaatttttttttttttttttttgagacggagtctcactctgccactcaggctggagtgcagtggcgtgatctcaactcactgcaacctccacctccaggatctgcttctgcatttcctcaatggtaaataaattcaagcgattctcatgcctcagtctcccaagtagctgggactacagctacatgccaccacacccagctaatttttgtatttttagtagagacggggtttcaccatgttggccaggctgggcttgaactcctgacctcaggtgatctgccgacatcaggctcccaaactgctaggattacaggcgtgagccaccgagcccggtcattgcttaacgttttaaatcctcatcttccattttcctgggctcctaaatggcctggatacacttttattttcttttttatgtatttatgtatgtatgtatttatttatttttcagagacaggatctccctctgtcacccaggctggagtgcagtggtgtgatcatccttcactgcagccttgaactcctgggctcaagtgatcctccccctcaggttcccaagtagctaggattacaggcacataccaccatgcccagctaatttttaaattttttgtagagatagggtcttgctgtgttgcccaggctggtctctaacttcaagtgaacctcccacctcaacctcccaaagtgctgggattacaggtctgagccaccatgcctagccccttattttcttgtaagtttttattgatttaaaatacagttacagaaaagtgttcatatcgatgaattttcactatgtgaacactcccagaaaactagaatctagatctagaaacagagcattaccagcacccagaagcctcctcattcccccttcaagtccctttttcttaccaaagttagtcactaccctgacttctaacaccatacattaaattttgcctgtttgggggctttatatgtgtgtgtaggtgtttttatgcgtggcttctttcgcttaatattaagtttgtgagattcatttatgttgtatatggtaatattttatttgttctcattattgtgtggtattacatgaataccacaatttgtttatccatttgtttatccataatttatttatctacaatttacatggataaatgccacagtttatttatccattgtcttattgatggacacatggagtgtttgcagttgggggctattactgaacagaagcattaggaacatctgtgaatactttttttttttaaagaacatatgagtgcatttctatctagaagtagaattgctgaatcataggacatgtgtgttccgcttttacagatattgtcagttttccaaaatgattgtatcattttacactcccaccagcaatgtctgagatttgttttttcttacatcctcatcagtggttggtattgtctgtcttttacgtttagccattttgatgggtgtatagtggaatgcttctttattttaatttttattccttgaagactaatgacgtttagcacctttttacatatttattggccttttgactatcctgttttgagaaatatctgttcagattttgaacccatttctctactaggttgtctgacatttttattgacctataagagttctttaaatatagatatgagccctttgttgtgtacatgttgcaaatatcatctcccacaaggctatgtggagtcacactggagcttcaggcaaaagaaaaaataaaaatcctgattcctgtctttattttagattttgatattttgttcaccatggatttttttgcattaaatttgattttttaaaatattgcatcaaatgtttatttctcctgattactgagttttttgtcacccccgtaaagaactgtatccaaggcaagagcctcacttgcctcaccccaatcctggcccatcccattctgtgtcttgcattgtcatgctctttaatatatattgttatttgttgaaaagcagtttctaatctaatgaagtccaaatgttcaagcttttcttttaagattagtgccttttcatttggatcacatttatacagttataaaaataaagatttgattttggtcattcttcagatgtttggctctgaatgacttaagctgaagtaactggttcctttttttaaatgttgtgccatcatttcacccgatgagcatttcttggagcctgctagatagtgttaggtcctcaggctgtaaagaggtcttcaacaggatgtaaagcaaacttaattgtaattactttattctgccgattaagaaatacagtactaaagttttatctctagtccctcaaattggcatccctcaaattggcatctggtaatgtacattgtggggtagactgataatcaaatgacagtgcaacatcttaccaagaagtaaatatgatctgagtgtcctataaataatgtaagagcaggttttcaaacttggagagctgttttctcatttcatgtacacttgccccaaattgtagtttttgaagtcatgtgcattgcacgttggatgagccagggaaattattacattaacaagcattttgtgtgtatgtagtagttactttgtactgagagaacttgctttggggtgcaattaaacaataaactgattttatttgggagaaacagggaagggtgcacttactagcaacctaagaataatttttcagcttttgcccttaaggtttaaattacaattccaaaatgttagacatactgtatctttttgttcagtgtggctttaattttcccccctatggtttgttctttaatgccttttacatttggacacatagtttatgctttttagattttggttgctatcttgccaaaataagtgttagctgtgtttcaaacttgattttctttctttctttctttctttccttccttccttccttccttccttccttccttccttccttccttccttctttctttctttctttctttctttctttctttctttctttcttttttttcctccagaatgtcttatttaaaaagaaagctaaaagtatacttctaagttagagcctctatttttgtataacacttgggatattttttacttcacattgaatatagacaggcacccaagaagtctgatggccaccggagtgcgggtgacaaggacctgacagagcccatgcagggctttagatttggacacacaagagttgataacttccttatgaactccttgcctgatctaaactcaatatggattctgactgtgtttgagtaaaggttaaacctgttggcagttactgcttttcacaaagtgcacagtggaaatcgagaattgatagggttaattttggagcagtggcttataccattcacctctttgtttttttgtgacttatctcacagataatgagaccttaataacaaacaggtgtaaaaaaatttcacattgaaatgatacaaacatttgatgtaataaaaccttgttggcttgatattttaaggaactgaaatctagcaatcttactggagagacaagaattggtctccagctgcctttgatagattcgggtgcgagtggagccggagccatatacctggagggaatgtggtttgtcacaccaaagaggattttttttcttcaaacttgcatgttgcctaggtttcaaattctttgccgcaaggctgatttgctttcactaactggaattttgtaggagatactggtgacctaagctaagttgcattcaacatactcagtgtcaagctaatgaggttctgttataaagcttctacttttaatctgagagaaaacatgttcagggcttctagaacactaaaaattttgacttagaacagtgttcagtctggtgccaaacttccaatggaattcaaattcacataatctgaactttgttcacaggttatcctaatagagtaattcttcattttgttctattgaactgtcttaaggatttgtttcaaacagctaagttacttgattaaaataatgataaaattgtaaaaaaaaaaaaaaagattagtgcctttttaaaatcccttataacaaattttgttttacccagtcttaaagatattctatcttatatcttctagaacagcaagcactgtccacttgaactttctgcaataatggaaatattcgatacctgcattgtccaacatgtagccactgaatggctactgagcgcttgaaatagcactagccacatatggctattgagcaattgaaatactacatatggtctacggccataccaccctgaaatattttacagatattgtcagttttccaaaatgattgtgtcaatcttgtctgaaacagtacatatgatgaaatgaattttaaattttatttacttttaaataatttaaatgaattgtggtgaatggcaatgtagttctggcaatgttgttccacctggaattgattttcaggtatgatgtgaggtcaagtttcccttttttttctgtatggatattcaatcaatccagcatcatgtaccgaaaacactattaatttcccacttttattattaatccattgtctatctaatatgtgtgtgttgttctggaatctccattcttttccatttgtccattagtctgtctttctgccacttgcaccctgtttccatttcctgtaactttgcaataagttttgatatttggtagaataagtccttcatgcctctcatcttccccaagattgccttggctattcttttttttttttttttttttttttcgagatggagtcttgctctgttgcccaggctggagtgcagcggcatgatctcggctcactgcaagctccgcctcccaggttcacgccattctcctgcctcagcctcccgagtagctgggaccacaggcgcccgccactacgcccggctaattttttgtatttttagtagcgacggggtttcaccgcgttagccaggatggtgtcaatctcctgacctcatgatctgcctgcctcggcctcccaaagtgctgggattacaggcgtgagccttggctattcttgaacttctatatttccacataaactttaggataactttataaattctaccaaaaaaaaccctgctggaatttttattgggattacattaaatctgtccatcaattaatatgaaagtctttacaatattaaatttttttatccatgaatatggtatatcccttcactagttgaagtcttattaaaattttttgatgttttatagttttctatgtagaaacctggtatattattcattggatttattcccaattattttctatttattttataagtggcatatatatatgtatattatatatatattttttgagacacggtttcactctgtcactcaagctggagtgcagtggcatgattttggcacactgcaacctctgcctcctgggttcaagtgattctcatgcctcagcctcccaaggagctgggattacaggcacctgccaccacacgtggctaatctttgcattattgtagagacagggtttcgccacgttggcctggctggtctcgaacgcctaacttcaagtgatcctcccacctcggcctcccaaagtgctgagattacaggcatgagccaatgcacccagccttataagtggcgtattttaattttatttatttatttattttttgagatggagtttcgctcttttttgcccaggctggagtgcaatggcacgatcctgcctcactgcaacctctgcctcctaggttcaagcaattttcctgccttagcctcccaagtagctgggattacaggcacacgccaccatacccggctaattttgtatttttagtagagatggggttgtttcaccatgttggccaggctggtctcgaactcctgacctcaggtgatccacctgccttggcctcaaagttctgggattacaggcgtgagccaccacgcccggccataaatggcatattttaatgttcatttttagttgtttgatgctggcatattgacataataattaaaattttgtatttatacttgcatacagcaaccctgcttaattaacttaataattcttatagtttatttatagattcacaatcatgtagtatgtgtagtgtgtgtagtgatttctttcagatagttatttttttaatttttttttttttttgagacggagttttgcacttgttgtccaggctggagtgcaatggtgcaatcttggctcgccgcaacctccgcctcgtgggttaaagcgattctcctgcctcagccttccgagtagctgggattataggcacacgccaccatgctggctaattttgtatttttagtaaaaatggggtttctccatgttggttaggctgatcttgaactcctgacctcaggtgatctacccactttggcctcccaaagtgctgggattacaggtgtgagccactgctcctggcccgttttttaacttctttttcttgaattattggactgggtaaaaccttaagaacaatgatgaataaaagtgaaaatagcaggcatccttatcttagttctgatagaaagaaagcactcaataatttcagttaaatatgatggttgctggagtttactttttgtagttactctttatcagattgaggaatttttcttctaattctagtttgatataatttttaaacattaacagatggtgaattttatgaaatgtatttttctcatcagttaaaatgagcctgtgatttttacactttattcattttatttattttctatttttatggataggtaatagttgtacaatttatgtggtacatgtgatactttgatacaagcatataatgtgtaatgatcaaatcaggataatggaatatccatcacctcaagcatttatcatttatttgtgttgggaacattccaaatctactcttctagttattttgaaaggtacaataaattatacttaattatactcaccctattgtgctaccaagtacaagtgtgcctggaattggtgggttcttggtctcgctgacttcaagaatgaagccatggaccctcacggtgagtgttacagttcttaaagatggtgtgtccggagtttgttccttcagttgttcagatgtgtccggagtttcttccttctggtgggttcgtggtcttgccgacttcaggagtgaagctgcagaccttcacagtgagtgttacagctcttaaaggcatcacgtccagagctgttcattcctcccaatgggtttgtggtctcactggcttcaggagtgaagctgcagaccttcgtggtgagtgttacagctcatagaggcggcgcatccggagttgttcattcctcccgctgggctcgtggtctcgctggcttcaggagtgaagctgcagaccttctcggtgagtgttacagcttataaaggtagtgcagacccaaagggtgagcagcagcaagatttattgcgaagagcgaaagaacaaagcttccacagcgtggaaggggacccaaacgggttgctgctactggctctggttgcctgcttttattcccttatttggccccacccacatcctgtcgcttggtctattttacagagcgctgatttctccattttacagagcgctgattttgccgttttacagagtgctgattggtgcttttacaatcctttagctagacacagagtgttgattggtgcatttacaatactttagctagacaaaaaagttctccaagtccccacccaattagctagacacagagcgctgattggtgcatttacaaacctttagctagacacagagtgctgattggtgcatttacaatcctttagctagacagaaaagttctccaagtccccacccaacccagaagcccagccagcttcacctctcacaaggtcttatttcttctattctaattgtattttgttttgttttgatttttgagacagagtcttgctctgtcacccaggctggagtgcagtggcaccatctcacctcactgcaacctctgcctcccaggttcaagcaattctcctgcctcagtctcccaagtagctgggactacaggtgcccgcctctataccaagataatttttttttgtatttttagtagagacggggtttcactatgttggccggactggtcttgaactcctggcctcaagtgatctgcctgcctcagcctcccaaagtctgggattgcaggcatgagctaccacgcccggcctcgaattgtatttttgtattcattaaccaaccctactttatatcttcctccctactacccttcccaccttctcaaaaacaccattccattcactacctttctgatatcgatttttttaactccacgtgagtaagaatatgtgacatttatctttctgtgtttgccttatctaacttaatgatgacctccagttccatctatattgttgcaaatgacagaatttcattcttttttatggcagaataatattccactgtatacatataccacttttttgtttttgtttttgtttttgttttttgagacaaagtctcgctctgtcacctaggctggagtgcagtggtgcaatcttggctcactgcaatctccgcctcctgggttcaagcaattcttttgcctcagcctcaagagtagctgggactacaggtgcaagccaccacgcctggctaatttttgtatctttagtaaagacaggatttcactacattggccaggctggtctcaaacttctcctgacctcgtgatccacctgcctcgacctcacaaagtgctgggattagccaccatgcctggcccatataccacgttttttaaatccattcatttgttgatggacagttaggttgatttcatatcttcgttattgtgaatagggctgcaataaacatgggagtgcagatatttttttgatacactgaattcctttcttttggaaatatacctatcagtgagattgctggatcatatggtagttctatttttagttttttgaggaatctctatattgttttccatagtgactgtattaatttatattcccgttaacagaatacaagcatccccctttctctgcatccttaccagcatttgttatttttttaaatttcttttccttcttcccaaacattactgctgatattttctatcttttctgataatagccattttaactggagatgagatgaaatctcactgtggttttgatttgtatttccctgatgattagtgatattgactatttactcatatgcctgttggccctttgtatgccttcttttgagaaatgcctgttcatttttaaattggatttttttaaaccagtgagttgagttccttacatattctggttattaatcccttgtcagttgactagtgtgtattaatattttcccattctgtaggttatctcttcactttatggattgtttcctttgctgtgcaggtttttgccttgatattatcgcatttgtccatttttgctttggttgcttgtgcttttgaggtcttactcaagaaatctttgccaggaccaacatcctcaagcatttccacaatgttttcttctagtggtttcatagtttcagttcttacacttaagtctttaatccattttgatttgatttttgtatatggtgagaaatgggggtatagtttaattcttcttcatatggatatccagtttttccagcaccatttatttatttatttatttatttatttatttatttatttgagatggagtctcactctgttgcccaggctggagtgcagtggcacgatctgggctcactgcaagctccgccttccaggttcatgccattctcctgcctcagcctcctgagtagctgggactacaggcgcccaccaccacgcctggctgattttttgtatttttagtagagaccgggtttcaccatggtctcgctctcctgacctcgtgatccacccgcctcggctttccaaagtgctgagattacaggtgtgagccaccacacccggcctccagcaccatttattaaagagttgactgtaaatgtatagatttgtttccgggttttctattctgttccattggtctatgtatctgtttttatgctagtgccatgctgtttgggttactatagctttgtagtataacttgaaatcaggtatgtgatgcctacggcttttttctgtttgatcaggatagctttggctattctgggtcttttgctgttccatataaattttaggacttttaaaaatatttttgtgaagaatgtcattggtatttttttgtttgttttcttttgtttttgagacacagtctccctctgtcacccaggctggagtgcagtggtgtgatcacggcacactgaagcctctacctcctgggcccaattaatccttctgcctcagcctcctgagtagctgggattacaggtgtgcaccactactcctggttaatttttttattttttgaagagacagggtcttactgtgtgcctcggttgactcaaactcctgggctcaagtgatcctcccaccttggcctctcaaagtgctaggattatacacatgagcgatacacagcacctggccttcactggtgtgtagataaggactgcattgaatctgtaaatcactttaagtagtatggacattttaacaatattgattcttccaatctatgaacatgagatggctttccattttttggtgacctcttcaatttcttgaatcaatgttttatagttttcattgtagagatctttcacttctttggtcgtttatgcctaagtatttttttctgtagctatcgtaaatgagactgctttgtgttctttctcaaattgttcacagttgaaatatagaaattctataatactaatttttgtatgttgattgtgtatcctgctacttaatttgtttatcagttccaatagggttttggtggagtctttagcttttctaaacataagatcatagtgtctgcaaccaaggacagtttggacagtttcctttccaatttggatgccctttgtttctttcttttgtatagttgctctggctaggacttgtagtactgatgatagcagtggtccatctggagcagctgctgccatcactccagctgcacattgcacagagctggtgggagccggcaacaagtgggagccctaccccttccaagttggtggggtgggagctctctgggtgcagctacagctgcccaagtcatggctgcagactcaggcctcccactccacggagcaggcaggaggcctaccctcacgggtgcagctacagctgcccaagttgtggctactgacctgggccttcctgtgctcttgggtggtccaggagcaggcaggaaccccaccctcctggatgcagctacagccacccaagtcacagctgcagagccaggcatctctgcactcttggcagcctgggaagacccccctgtacccccaaccaggctcagagaagtctgctcccactgcctggcctctccctgctcccagcacccactccaatcttggagtaaggttggggctgggcccaggcactgtcacaacccagccgtgtgtgcatacacttggggcagtgttgacatgacagtcccctgctgccttgggcccctctggatttggggcaccaacgagaatgggagggaagctaaggaggggccgagggcagcttggcattggcctgcaggtgtcccttggcatgataacctgggtgcgatggacagcagtgggaggcagacaggctcctgggtagaagggagggcctgaaggctgggagtctggctgccagtcccacagaccagagtgggaaatagtggtgccttttcccagcccacccatggctgcccatggaccaatcagtgtgcacttcctcccttttgaggcccataagagcccccaattcagccagagctgagcagattttgggacaacctgctacagagaggagctgcccactccagggcctcctctgagctattttgtcactcagtaaagcttctcttcaccttgctcaccctccatttgtctgcacacctcattcttcctggacgcaggacaagaactcgggacctaccaaatggtgggactaaaagaggtgtaacacaaacagggctgaaacgtcccttgctcaccacgttgagggtgaagagaaggatagaagagctgtggccctttggggagcccagacctgggagttccctgagccagggctatgactccgtctttggggccctgtgactcctggagtctccaagcttctgggagccaccacattccccagtggcaggtgtggaagctgcttgcagtgtgtctggtccagttgcagcctcacagagagtcagcacccacgtcagcacctggagctgcctgccccacagcagctgacatgcttgactgtgcgcagtggccagacccccatgcttgctcactcacacacctgctgccactccatgcctggcttgcctttggcaggcatgggatccaggccagtagtgtggaccaagcacaacctgccaggctgagtgggcagaataagaccagcgggcctgagcaaaactcaggcaaaggtgccaccagccacagaggtttccagccagaaaagtgacaccccgaggatcctgcaacagtactaggttgaataaaagtggtgaaagcagtcatccttgtcttgttccagatgttagatgaaaggctttcagtttttccccatttagcatgctgttagctgtggggaccttattcattttatgatgaaccacagtgactgatttttttgaatgataacttaatcttgtattcctggaataaaccctatttggtcatggagtattagtccttttatatatttctagtttgggtacgctaatattttggttaagatttttacatgtatattatttttaaaatttgatatgtaatttttctcttgtagtgttctctctcttttttaaagagacaggtcttgctctgtcatccaggctggagtacagtagcttagtggcttgattatagctcactgcaaccttgaactcctgaacttaagcaatcctgctgcctctgcctcccaggtacctaggactgcaggagcatgccaccatgcctggctcgatttttatttaatgttttatagagacaggttctcactgttgttgcccaggctgatctcaaactcctgatcttaaatgatcctcccagtttggccttcctcaaatgatcctcccacttcggcctcccaaagtgccagaattataggcatgagccaccgtgcccggcctcattgccatatattttaattttatatatactttaaattctacaaaatgttgttgttattgttgtcagtgctgttgttttatacaattggcatttgttaagatttacccactgttgttaacttaatgttgttctatatttcttctttcagttttgtgcttccattgagattactttctttctgcctgaaaaataccatttagaatgtcttttaatatgggtctacgggtgacaaatttttctcaggtattatttgtctgaaattgtctttatttccaccttcatttacgaaaaaatgtttttgctgaatgtagaatcccaacttagttattttctttcattttgaagatatcattccattgttttctgagttatgttgtttcctttgagaaattagcagtcagtcttactttttgatcttttgcaagtaaactgacttttttcttgtgctactcctaagatttttctctgggtcgttagctttttatagatgtacagtcacatgcctaggtgtacatttatcctgcttgggctttgtggcatttcttgaatctgtaaccagataaagatatcaagtatataaagctttggtacattctcagtaattatcttctcaaatattgcttgtgtcccattttctctctcttatccttctaagattataactgcttactatgtcctatatgattttacattcttttctgtatttttcatcattttgtaactccatgttttagtctgtgtattttcttctgaattttctttcatttcaccaattctgctttaagctgagtctaatttattattaaactcacctaatagattactctttaaacttttatttgtaaataatttcataacgtaaagaaaagttacaagactagtaagaaaaattgcaacaactcccatacacccaatctctgattgttaatactttgtctcatttgctttattattttgtgcctgtgtgttcactctctttcttcaaatgtgcacacacattcatgcacacacacattttttacacataaaatttgagagtaaatttcatacatatacattatgacccttttctactaaatatttcattgtgaatttccaaagaataagaatattttcttaagtaaccatggtacagttatcactcctataaacttatttagtatattttaatattgatgcaatacattatctactgtctattttacaattttaacaattgacccaataatgtcttatatagtatttattttccttcagtacaatctcctttaatctggagcagttcctcagccattctttgtcttttatgacattgacatttttgaggaaaaaaaattcttcttttgtgtgatagaattattttaattttgagtttatctgatgttttcccacctgcccttgttaattttgatcactccattgagatatttccattctttacccttataactaataagcaatctgtaggggaaatactttaagaatgtgcatatatcttgcatctattgatgattcttacttgaatcaattcttactatgatggttgcaaaattaagattttccaactccagcactgcttttgagtgactgtaggacttaccagtcagcacttgacatactactataagcaagaagcctcctagaatgtttatccctccaaaagtcactttaaacttagttgccattgtaacagtatcaacaggtgagacttctaagaggtgattaggccatgaggactccacgcttgtgaatagacctaatgctgctatcattattgcaagggtgggttcacccttcttgctccttctcctccatcctttctttatccttctgccatgtgatgccttctaccatgttatgacacagcaaaaaaggccctcaccagatgccagcccttctatcttggacttgccagcctccagaactgtgaaccaataactttctttgcattataaattacccagtctgtggtatgcttttatagcagcacaaaacagtctaagacagaaagttaatgccagagagtggagtgttgctataaccaacacctgaaaaatgtgaaagtggctttggaattgagtcataggtagagactgagacagttttgaagtgaacactgaaaaagtctgtctctaaagcagcagactggtcattttcttctgcgggccagagtagcacttcaaaaattgcatgaagcaggggcatgaacatctgttgtaaaaacggggatacttgtaccttgaatttggccgtaatctggttgataagaggaatgaactcctggaggtcttttgcttcacaatctttgagtatatgttctgaagcagatgggatgaacggaaaaacttcttcctccaggcaaataatcattcgatgaaggaaagtacagactccacttctgagaatacccttttgtaagggacaactgagggccagcaagaatgtctgtaaacagtccagataaacttcggaacagccacactgtttcacagtctgcttgttgctgaaagctttactagttcgacttgcaaatccaacagcatggttgagacagtctgctagagaggcttgcctttcttcatcttgtgccagcatcaaattttctaacagaattttaaacttctccattagtggagtcaacagattcctcattaaggcttctttcctttctgccgggtattcattattaacaatcatcactccaactgtctcataaataaaatttgatcatcgctgctcaggaaggactggtggccattctcaggtggagaaagctttaataaatcttgtattctattcaaaatatcctcaatgaaaggattcatttgcttattgagagatttgacaaatctagaaaacaggtaagccatcttgctctgaacttttgcactggaatgacgcagacctctgtgatctaagaaagccattagtacacatggaacgtgctgaggttcaactgtgaaaaacttttcatatctaacaacagtttcgaagaactccaacgtcacagatgtatgctgataggaactgactcctgatgttaccagagttcgcatcataccctgcaaagcactagcttttgaaacatcacctgagaagtgagcaccatgagatagatactggaagagcttctgccaacatatacagcaatcttattgctacttcaacttccatgaaccgtgtagtctgccaattctgcagtgtagaactaaaaactctgcgaacagaggccagtagtaactctcgtgaaacttgagcaagcctgtccaacactaacttcagttgttttctatattctacaaacatggctttatcttgaccctcattttcaaagttatattcttcatcataagtcaattttttcataacggccaacatgattgcctccacattagctttttgctgatccgagagcactgtaagctgtttcaaaatatgaagataatcataacaaaatccaatattagaagaaatatcatcatcctcatgaattagtagctgcaacatcagtgccacttttgtttcaatagcttgtagtgcctcttgagcattcttaatattcccattcttagttaatttactccaactaactatccatgactgtcccattccgtttaccggcttagaaaatctggccaacatcttcttcctggtcaatgctgaaaagaagtcaacatcttcttcctggtcaatgctgaaaaagccagcagactgtaatacttgacacaaagattctactagtttcattttatcaacagggtccattcctttatttacaacttcaaataaacagtcacatgcttcttcccgtagaacttctattgacatatgacctagcagcatatttataaacctatcattggctaaaagggataagtcaatccaagagacataagccccaactacttcaaggcactgacacatcacttcagaattagtatactgataattttgtgatatttggtaccatgattccaccagatttggaatgcactgttccctcatggtatcttttatgagagtattcctgtgagcctcctctgatgtatgcaccacatcacgatccaccaactctgagttgatagccatgaggattcgcaggtacagatctactccccttggatttaggtccactactgagagaatgtcaaaaaaaaaacttgggccacttagtgagatattctgcaacaaaaagcaaggcgaggacttgggcggctttatttggtataaaggtcttctctggttggggattcagcatctgagcttgcagccatgatatgagcgtctccctaattagttgttgttgaacagtggttagttctgaatatttgtatttaacttgatgttccagtacttgaaagcagaaaaactttacatgatcatcactatatgtcctctgggctagagcttctgcacacacctgccaggcatctggggaaatctttaactgctcaaaataggccagggcccttagtctaaagtctgaatcagcatttggatttagccctaatagagcctgtttatccatccttgctgctatacttggagttttctggttataataggcttgccctctgatcccacagaagaatttataaacatcttccctatcactccagcccgcctcccagcctgaactccatggtcagccagcggaacggagccgagcggcgcagctcgcagagagctgggacagcggccctcgtccttgtcgccgtagtcctctgccacgaccgcagcgccaacgccagagacggagttggccgggactgcacgcctctcgtcgctccgcgtcccctggcaccttctcttgagtggcaggcaagcaagcaagcaagcgggcggggtcagcgccccaagaagggaaagagcgcgagggccagctaacgccgccgccgccgtcgccgctgagtcagcgcgaagcgccctctccgagtaggtgccgcgcgggcgggcgctggcgccagcagtctcatggagagtgcgggcggcagcccgcgggctggggccgtctcctgtctatttcttatttattcctttcaaaatggcgtcttatgataagcaaaaaaataaattttcttgaagtccaatattttatttttacttttatggttagtacattttatgttctacctatgaaatttccgtttactccatagtcacaaagatatacttctagaagttttatggttctagtttttaatgtaggtctatgatccatcttgaattaattttttgtatggaatgccataggggttagagctgtctttccatagagatacccagtttttttcacacatctgttaaacaggcattcctttgcctcactgaattgatctgatgccttggttgataatcagttgactatatatgtatagatctatttttggacttgatcctgttccattcatctgtatctgtctactctagctttgtggcaaatcttgaacttgtgagtataaatattctaaatttgttcttttttcaatattgttttgattattctaggtcctttgcatttccatataaattttagaaccatgttgtcaatttcttcaaaaaagcctgtggagctctggagacgatttgaggttctatatgatgttatctctctccagaagggtttacttttgtttctgtcaagcgaataggctagaggctgaaactttcatctagtaagtgtctgaggaagtcaaagctgggctttaatccttgtgagagctgatctctttccaatttgcccttatccctagagtggagcccttcatggtcccagctgaaagcctggagaggctgcgcgcggtggctcacgcctgtaatcccaacactttgagaggccaaggcaggtggatcacttgagcgcaggaattcaagaccagcctgggcaacatggcaaaaccccatctctacaaaaagtacaaaaattaaccgggcgtggtggtgggtgcctgtagtcccagttactccggaggctgacgcaggagaatcgcttgaacctgggaggcgcaggttgcagtgagccgacatctcgccactgcactccagcctgggggacagaatgagactccaactcaaaaaaagaaaaaaagaaaaagaaagcctggggatatttaccaggacccttcctccttttcaggtaccttactacaatttatgtctcatcagccctggctgggaatctactgaaagcttatttatgtatttatttatttattgagacggagtctcgctttgttgcccaggctggagtgcagtggcgcgatctcggctcactgcaacctccgcctcttgggttcacgccattctcctgcctcagcctcacgagtagctgggactgcaggcgcccaccaccacgcccggctaatttttttgtacttttagtagagacggggtttcaccgtgttagccaggatggtctcaatctcctgacctcgtgatccgcccgcctcggcctcccaaagtactgggattaacaggcgtgagccaccgcgcccagcccgctgaaagctcttttcagcctctcagcgctgcttttgcttttggaatcagcaattgtcttcagagtaaagtgtctccaaataccagtctcaccttacttggcttctctttttctccagatcttggactagcaaattctcactgcttttgtagctcttccatagctccaaattgctgtttttaaaaagtgctaatttgttcagcatttgtaattgttctcagcaagatgtttgaaaaagaccaactagtcagcctttgccagaaatggaactctatgacacacatttttagaaatataagttcattaagattaactttgttttggaagatacgttcagactttattaatgattttggagacaattgggaaattgcgagcatggaggtttggcttcagcattatgagggtaaaaaactcccacaaatcctcagattggaatgacagagcccacaagcaggatatgatatttggagctgttcactaaggctatttggtgtgccttgtacacctaccacttcttcaccactcccttctaaaaaggagagattgggaaaaatatagccttgttcattacttttatccagtcccactgaggcaaagtggcatcacccatttatcattttttattactgagcaatagcagcatgcaggtcttatagctggatacttctggggagcactcctcctatttgcttttagatatctgctcacccaccctagcttaatcccaggaatttttcacagtgctgtcatttaacagggggaatcaggctggtggagatggcagtagcaagggaaaaggagcatgtgtccttttcagcaatttttttttttttgagaccaggctggagtgcagtggcacgatgtctgctcactgcaagctccaccccctgggttcatgccattctcctgcctcagcctcctgggtagctgggactgcaggcgcccgccaccacgcccagctaatttttttgtatttttagtagagacggggtttcaccatgttagccaggatggtctcgatctcctgacctcgtgatcctcccacctcggcctcccaaaatgctggaatcacaggtgtgagccaccacgcctggccccttttcagcaattttaacgtaaccctctgaagtttctcaaactaaatgtgagaatagctggaaacctatggctcttgtatacagatgtacactataggcagttgtatagacttccaaacacatacacattacatgttcaaatgtatataaatatagactcaaagctcctagggaacaggtagtataagaaaaggaagcctaaccttaggctaaactagataatgtcatgtaatacactagactagacactatatggaaagaggtgatccaagtgatcctcttgaggaaggagagaatcaaggagtaaaaactaacttttgtggatgcttgttatgtgccaagtgtggtgcttaaacaccttttctatctttacacattcaatcatcataatgatcctgcagaataggtattgttatccccatttttaatttaatctcccaaaaggccacacccaagaccaggagctagtgtatttgcaaagccaagattcaaatctaattctgcctggctccaaaacttattctctgaaagtaggaaagagaggcagaagttcttatttaaacaattagactctgcaatagagtttccaagcaaaatataattaataaatttgtttactctttctctctcatagtggtcaacagcattaatctcagtgaataacactgtataagcacttactagaataaaagtgctcagttactaggttttgctgggcaagtgtaaggttgcttgtgggtggtgagaggaacagagcacagaaatgttaacattcacaaactttctgaacacctgagcactgagctgggaacccagaatataaagataaaaaatacaaaacatgtgctgggagcggtggctcacgcctgtaatcccagcactttgggaggccgaggcaggcggatcatgaggtcaggagattgagaccatcctggctaacacggtgaaaccccgtctctactaaaaatacaaaaaaattagctgggcgtggtggtgggtgcctgtagtcccagctactagggaggctgaggcaggagaatggcatgaacccgggaagcggagcttgcagtgagccgagatcgtgccactgcactccagcctgggcgacagagcgagactccatcttaaaaaaaaaaaatgaactttatcttccaaagtttacagtctagttacttcagagatggtttatgtgccatctacacgtgtagaactgacatacccataaaaggaacagataataaaaagactagtaagtctggaccttctctcatgaaactcaaagtctaagggggaatcagactaataaatgggcattttcaatacaagagattaagttaaaagtaagcacaggggccgggtgcagtggctcacgcctgtaatcccaacactttgggaggctgaggcaggctgatcacttgaacccaggagttcaagaccagcctgggcaacatgatgaaaccctgtctctacaaaaatacaaaaattagccgggtgtggtgcatgcacctttagtcccagctactcaggaggctgaggtgggaggatcgcttgaacccaggaggcagaggttgcagtgtgctgagatcatgccactgcactccagcctggatgacagggcgagaccttctctcaaaaaaaaaaaaaagaagtaagcacaaggtgtcatgagaccatggagagcaagcatttaactcaacacggggaatcagggaagcaggaaggaatgactcctgaactgacatagggaggcagaatgaattcatttgacatgcttagcacggaacactgacaatatacgtgttctgaacagaataatacagattatatggtaccatagaaagtcaatgactcatgattgatgtatttcctgaacaactaaagagtggttgctctcagactattaatcttcctttctcttccctatgcttttgtcactccgaaagcccattctctgttgtgtggatgtttttcttcctttcttctttccttctttttttttttttttttttttttcttcagtgaaggaggatgtcataagagctggagaaactgaggaggtcttcaagcagaatgtgggacttgaagaatttgtggaatataaaaagaggatgttgaaagggaaacaaatggcagggccaggcgcgatggctcacgcctgtaatcccagctttttgggaggctgaggcgggtggatcacgaggtcaggagatcgagaccatcctggctaacacggtgaaaccccatctctactaaaaatacagaaaattagccgggtgtggtggctggtgcctgtagtcccagctactggggaggctgaggcaggagaatggcgtgaacctgggaggcggagcttaaggtgagccgagatcgcgccactgcactccagcctgggcgacagagcgagactctgtctcaaaaaaagaaaaaaaaagaaaaagaaagggaaacaaatggcaaatgttgactcagtcagcttgcatttattgggccctaccctgcctctttttatcatgttccagggacactgagatgaatctgatccatgggttgaaatcagcaggatacgtatgtgggcaataaatggaaagcatatgtagcatagttagaagtaaagtctaataagcaaaatgggataggttataaagggcctggaaaacagacacatttagacttgatgtggatgataccaggagtccttttaggtttttgagcagaaagtaggtggaaaagattttagaaaaagaaaactggaaccatacagactaagaaggtgtgtgtgagcctaattctggcagtgaaggtctctagggcatagcggaaggaatagaaagaaaagagcaaaggacactgtaatgaagagattaggccagccacagtggctcacacctgtaatcccagcactttgggaggccgaggtgggtggattgcttgagctcaggagttcaagaccagtctgggcaacatggcaaaaccttgtccctacaaataatacaaaaattagccaggtgtggtggcatgtgcctgtagtcccagccacttgggaggctgaagtgggaggattgcttgatcctgggaggtagaggctgcagtgagccataattgtgccactgcactccagcctgggcaacagagtgagaccctatctcaaaaataaataaataaataaatataaagaaaagattgaccaggcatgtggatataaagaatctttagctgtaggataccagcttttgccatagaaaatacccagttacagctcatagaacctaaaagaatttgagttggcaatggtaggctacagggaggaaggataattaaaaaaaaaaaggctacagatggaggaggatgaggctgtaactgctatgatctacagcaaataagtagcccaggccttaggtgttttcatttgtggtttagggctccagagcttcttttgaataaccagtaaggacccatgactcagaatcattgcttcgagggccgtattgagcaactctgaaactagatgcagaacagatgtcgttgtagaagcctaacatgcagagaaacttgtaaaatatatatttttttcaggccctagattctaagatcctgctttgcagatctgaagtgggacccaggaatctttaacaagctctaaggtaatggtaatgcaaaagttactccctctccctctccctctccgtctccctctccctctccccacggtctccctctcatgcggagctgaagctggactgtactgctgccatctcggctcactgcaacctccctgcctgattctcctgcctcagcctgccgagtgcctgcaattgcaggcacgcgccgccacgcctgactggttttggtggagacggggtttcgctgtgttggccgggccggtctccagcccctaaccgcgagtgatccgccagcctcggcctcccgaggtgccgggattgcagacggagtctcgttcactcagtgctcaatggtgcccaggctggagtgcagtggcgtgatctcggctcactacaacctacacctcccagccacctgccttggcctcccaaagtgccgagattgcagcctctgcccggccgccaccccgtctgggaagtgaggagtgtctctgcctggccgcccatcatctgggatgtgaggagcccctctgcctggctgcccagtctggaaagtgaggagcgtctcctcctggccgccatcccatctaggaagtgaggagcgcctcttcccagccgccatcacatctaggaagtgaggagcgtctctgcccggccgcccatcgtctgagatgtggggagcgcctctgccctgccgccccgtctgggatgtgaggagcgcctctgcccggccgagaccccgtctgggaggtgaggagcgtctctgcccagccgccccgtctgagaagtgaggagaccctctgcctggcaaccgccccgtctgagaagtgaggagcctctccgcccggcagccaccccatctgggaagtgaggagcgtctccgcccggcagccaccccgtccgggagggaggtggggggtcagcccccccgcccggccagccgtgccatccgggagggaggtgggggggtcagccccccgcctggccagccgtgccctccgggagggaggtgggggggtcagccccccgcccggccagccgccccgtccgggaggtgaggggcgcctctgcccggccgcccctactgggaagtgaggagcccctctgcccggccaccaccccgtctgggaggtgtgcccaacagctcattgagaacgggccaggatgacaatggcggctttgtggaatagaaaggcgggaaaggtggggaaaagattgagaaatcggatggttgccgtgtctgtgtagaaagaagtagacatgggagacttttcattttgttctgcactaagaaaaattcttctgccttgggatcctgttgatctgtgaccttacccccaaccctgtgctctctgaaacatgtgctgtgtccactcagggttaaatggattaagggcggtgcaagatgtgctttgttaaacagatgcttgaaggcagcatgctcgttaagagtcatcaccaatccctaatctcaagtaatcagggacacaaacactgcggaaggccgcagggtcctctgcctaggaaaaccagagacctttgttcacttgtttatctgctgaccttccctccactgttgtcccatgaccctgccaaatccccctctgtgagaaacacccaagaattatcaataaaaaaataaattaaaaaaaaaaaagttactcaggagacccttttagaaatacttagggaaagataagctgtctccttgggatgactgggctggtgtctgtgcatatgccttctctggatccaagtgactttaccacaccaagccttaagactgccagactgttctctccattgaaagccattctgcaccactggccatacagaaggaatctcatattccaggagactggcccaaacaggactgttgagtggctctaaggcttttagacgtcaaaagggtttataagaataatcatcataatatagttatgaatcagaaacatgcatacattttcttaaatgaccctgtggggatgagttaaaaagggaggagtacccagatgcaggcgtctagcagaatggacttgcttgagaatatcaagcaagacagccaaagaggactcctaggattgtctcaccaggacttctgaggcgactctaatgaaatgacttaaaagtgtggtggagtggcttctgtggctcccacacctgcctaatcctggttgatattgcacaaccagggtgcactgacaatctctgggaaaaaagcaaggtctaatattcaaagcttggcaaacatgaccaagactttttctctttcctttgaattattttagttccctaattttttgtcccatatgccacttaattctttttattttgtattaaaagttgtgctcttgtctcaaccttctttctagattggatcctgcatgttttttttatcattatacttttggcagccctaccactaggcttcctgaaatatagcacctttgtttttgtttgtttgtttgtttgttttgagaccgagtttcgctctgtcacccaggctggagtgcaatggcacaatctcagctcactgcaacctctgcctcctgggttcaagcgattctcctacctcagcttcctgagtagctgggattacaggtgcgtgccaccacccccggctaatttttgtgtttttattgagacggggtttcaccatgttggtcagactggtctcaaactcctgatcccatgatctgcctgcctaggccttccaaagtgctgggattataggtgtgagccaccgcgccctgcctgcacctttgttatatagaaaattcttatcaacattattgtctacttttagactttattttgttctattgaactattctggttctagtaccatacattaaaattatagctttataatactttttaacatctgacaggatgtgctccccttatcatccttctttttcaatattttatcattctcacagtttttctcagatcaacttcacatgtaatttacaaaaaaaattaaaattacattggtatttaggtggaaattatgttaaatttatgtactaatctggagaagtcttgtttcgtaataataattcttaccatgaaggaaaatagcttctctctccgctgattcatgttttttctcatgtctctcagtagagtttatagctttttttgtataagttctcataattgcttgaatatattcctaattattttatttttgttgttttgggtgtgaatgagatttgtttttgttcatttttaatgggttcttgttggcatatacaaaaaccactgattttaaaatacttatgtaataactagatgtgcacctactttttttttttctttttttgaaacggagtcttgctgtgtcgcccaggctggagtgtagtggcgcagtcttggctcactgcagcttccacctcccaggttcaagcgattctcctgcctcagcctcctgagtagctgggattacaggcatgtgccaccacacccggctaatttttgtatttttagtagagacggggtttcaccatgttgggcaggctattcttgaactcctgacctcaggtaaggaggtcacccaccttggcttcccaaagtgctggaattacaggcgtgagccacacgctcagctgacgtgtacctactttagaacgtgtgtctcttatgtcagcttaccattattgtccatgtaatttgccattttaacagactaaaaaagaaaagctatatgacattttcaataaatacattaaaaagttgagaaaattcaacatttattctgatttttttttaacttttttattttgagatggagtctcgctgtgtcacccaggctggagtgcagtggcacgactttggctcactgcaacttctgcctcctgggttcaagcgattctcctgcctcagcctcccaggtagctgggactacaggtgcacaccacaaggcccggctaatttttatattttttagtagagacagggttttgccatgttggccagactggtctcaaactcctgacctcaagtgatccacccgcctcagcctcctaaagtgctaggattataggaatgagccactgcactcagcctgattttttaaaaagtcttaacaaactaataatagaaaggaacttcctcagtctgataaagctcatctacaaaaaatctacagctaacttacatacttaatttttttttatgttttatagagatggggtcttgctatgttgaccaggctggtcttgaactcctggcctcaagtgatcctcccatcttggcctccccaaaatgcttggattgcaggtgtgagccaccacacctggccccatacttgattaaagaccaaatgttttcttctacaataaggaacaaggcaaggatgtctgctctcacatcttctattgaactctctactggacattccagttaattcagtaaggcaagaacaaggaataaaaaacaataagcttggaaatgaaacagtaaaactatttatttgcaaaagacatgattgtttatgtaaaaaatccaatgaagtccttaaaaagtctgctagaactaataaatgagtttagcaagtttgaagcatacaagattaatatacagaaactagtttatttctatattgtagcaaagacaatacaaattgacgtgttaaaaaatgccatttataatggtaccaaaaatattaaatttttaatgataaatctgtgcaagactcatatactgaaaccataagacattaatgagagaaattaatacttaaataagtaaagagatataccaggctgggcacagtggctcacacctgtaatcctagtacttagggaggccgaggcaggcggatcacgaggtcaagagatcgagaccatcctggccaacatggtgaaaccccatctctactaaaaatacaaaaattagctgggcatgatggtgcacacctgcagtcccagctactcgggaggctaaggcaggagaatcacttgaacccaggaggtggaggttgcagtgagccgagattgtgccactgcactccagcctggtgacagagtgaggctccatctcaaaaaaaaaaaaaaaaagagatataccatattcgtggatcagaggactcaatattgttctgatgtcagttctccccaggtttatcaatagattcaacacaactccaatcaaactcccagtaggttttagtagaagttgacaagtttattctaaaattcatgtggaaatacaaaggacttagagtaatcacaacttcaaaaaagaacagtttgaagacttcactctccctgacttccagacttggagaataatcaaaacagtgtagtattgctataaagatagacaagtcagtagttcagaatagagagtctaggaatagactcacacatgtatggtcaagtgatttcccacaaggtacaaaatataatcttttcagcaaatggtactggaacagttagccatatgcaataaaatgaacttcaattcataacttcacaccatataaaaattaattcaaaatggactgtagacataaatgtaaaatctaacactatagaactttcttttttttttttttttttttttttttttttttttttttttttttttttttttttttttttcctgattaatttttatttattttttttattttttcctttggaaactactttattttttatttattttttttttgaacatatgtatttgtcaatatatttttggctgatgtgtttacacaggaaaaaataatatttacatactcaaacctcagttcaacattttaacaaaacaacatgcagaaaagtcttcacttcctttctaaatacaaatgctagaatgtcggaatcacacgtggatgttttgaaaagcgtgctgagcctcctcaagggtcatggagctgcacatgctacgacaccaaagcaactgggttttgttggttttgtggcagttgcttattaatatgtaatttacattcagtaaaatctgccttttattttttttttattttttatttttaaatttatttttttattgataattcttgggtgtttctcacagagggggatttggcagggtcatgggacaatagtggagggaaggtcagcagataaacaagtgaacaaaggtctctggttttcctaggcagaggaccctgcggccttccgcagtgtttgtgtccctgattacttgagattagggagtggtgatgactcttaacgagcatgctgccttcaagcatctgtttaacaaagcacatcttgcaccgcccttaatccatttaaccctgagtggacacagcacatgtttcagagagcacagggttgggggtaaggtcacagatcaacaggatcccaaggcagaggaatttttcttagtgcagaacaaaatgaaaagtctcccatgtctacttctttctacacagacacggcaaccatccgatttctcaatcttttccccacctttcccgcctttctattccacaaagccgccattgtcatcctggcccgttctcaatgagctgttgggcacacctcccagacggggtggtggctgggcagaggggctcctcacttcccagtaggggcggccgggcagaggcgcccctcacctcccggacggggcggctggccgggcggggggccgacacccccacctccctcccggacggggcggctggccgggcggggggccgacacccccacctccctcccggacggggcggctggccgggcggggggctgacccccacacctccctcccggacggggcggctggccgggcagaggggctcctcacttcccagtaggggcggccgggcagaggcgcccctcacctcccagacggggcggctggccgggcggagggctgacccccccacctccctcccggacagggcggctggccgggcggggggctgaccccccaacctccctcccggacggggcggctggccgggcagaggggctcctcacttcccagtaggggcggccgggcagaggtgcccctcacctcccagacggggcggctggccgggcggagggctgacccccccacctccctcccggacggggcggctggccgggcggggggctgacccccccacctccctcccggacggggcggctggccgggcagaggggctcctcacttcccagtaggggtggccgggcagaggcgcccctcacctcccagacggggcggctggccaggcggagggctgacccccccacctccctcccggacggggcggctggccgggtggggggctgacccccccatctccctcccggacggggtggctggccgggctgaggggctcctcacttcccagtaggggcggccgggcagaggcacccctcacctcccggaaggggcggctggccgggcggggggccgacacccccacctccctcccggacggggcggctggccgggcggggggccgacacccccacctccctcccagacggggcggctggccgggcggggggctgacccccacacctccctcccggacggggcggctggccgggcagaggggctcctcacttcccagtaggggcggccgggcagaggcgcccctcacctcccagacggggcggctggccgggcggagggctgacccccccacctccctcccggacagggcggctggccgggcggggggctgaccccccaacctccctcccggacggggcggctggccgggcagaggggctcctcacttcccagtaggggcggccgggcagaggcgcccctcacctcccagacggggcggctggccgggcggagggctgacccccccacctccctcccggacggggcggctggccgggcggggggctgacccccccacctccctcccggacggggcggctggccgggcagaggggctcctcacttcccagtaggggtggccaggcagaggcgcccctcacctcccagacggggcggctggccaggcggagggctgacccccccacctccctcccggacggggcggctggccgggtgggggggctgacccccccatctccctcccggacggggtggctggccgggctgaggggctcctcacttcccagtaggggcggccgggcagaggcacccctcacctcccggaaggggcggctggccgggcggggggctgacccccccacctccctcccggatggggcggctggcctggccggggctgacccccccgcacctccctcccggacggggtggctgccgggcggagacgctcctcacttcccagatggggtggctgccgggcggagaggctcctcacttctcagacggggcagctgccgggcggaggggctcctcacttctcagacggggtggttgccaggcagagggtctcctcacttctcagacggggtctcggccgggcagaggcgctcctcatcttccagacggggtcgcggctgggcagaggcgctcctcacatcccagatggggcggcggggcagaggcgctccccacatctcagacgatgggcggccgggcagagacgctcctcacttcctagatgtgatggcggctgggaagaggcgctcctcactgcctagatgggatggcggccgggcggagacgctcctcactttccagactgggcagccaggcagaggggctcctcacatcccagacgatgggcggccaggcagagacactcctcacttcccagacggggtggcggccgggcagaggctgcaatctcggcactttgggaggccaaggcaggcggctgctccttgccctcgggccccgcggggcccgtccgctcctccagccgctgcctcccgggcggcgctcgccggcgcggcggcaaagactgagctagaactttcaaaagaaaacatagaagaaatcttttgtgactttgagttaagcaaagatttcttaaatatgacaagaaaagcacaatcaataacagaaacattaaattgggctttgtcgaaattaataacttctatcaaaggacactgttaagaacaatgaaaattcaatcctctgactgggagaaatatatacaaataacttatctgacaaagaacttgtatccagaatatagttttaaaaataagaaacactacccagttttttaaatgaacaaaagatttgaacagatactctaccaaaaaatatgcaaattgaaataagctcatacagatggaaataagctcattagggaaatacaaattatcactgcaatgagatactactatgtacctattagaatttctcaaattaaaaagactgaccataacaagtgttggcaaggacattgagtaatggaactctcatatatgtcaggggtaggatttgactttaccctacttataagccagtaagttagcttgttgtttcatgaattctaacagaagatatgagactcaggtcagagacaatgaactttattattcatcacacagcaagcagcatgagcattaacttttgcatcagctcttgctccctgagtccaacagggacaacacaaaggcccagatgaaggtctacacatgtggtaaatgtgttacatgacaatagcactgagtttggggaacccacattttatagaaagcagtaagtgagcttgctttttaacccagggagatattacttcacagctcaaagttgcttgctgcaaagacaatcctgagaaatggcctggctaaagagcagtcaataccttacattcttggtatactctataagatgaggaggagcataagagactcatggcagaatgtctctcaacagcatccaccgtcagttctacatcatcttgacttcttgagagattttcacttgagcatgccattctgtaggccactttgattaatctgattagtagaggttggaaccaaatccgtccaatttatctcatacagcatagaccactgtcaataaatccccaagcagcaagatgagacaaacctgcagtattgacctcagagtaccagattcaaccacctgtgaataagtctcaggaggatctgtaggtcttatttgagacatccagtatatagtttaaggccagtcgtaatcaccatacatagcataaccaaggccactcaggcatcaggagaagcacatgattttgtatgagtcagcttaaaacatagttgtgccagtctgtgtttgtacatgtatgtagatgtatgtccacctttgacagcaccaggcacagaaggcatagtgtcaggccatgtccacatgagtttctctgttttaatagcacatggactggtttgacaaacccagcagcagatgagattggcagcctgatgacagtgtgcctcaaacaaaccatgtaactatttgccaggttgcagtgctggatctaagggacatagagaacattaactgttccctacctctccacacttcctggagtttaacgtgttctccctccaggtactgggatcgttgttctccttccacagctacaaaatcagtgtgtcccaacccagtagctgtaacttcaccttttctccaattcttccccactcacaccaacatttttcatctggaagagtcaactgtgaatgggacaagagcttttttttttttttttttttttgatacagagtctcgctctgttgcccaggctggagtacaatggtgtgatctcagctcactgaaagctctgcctcctgggttcaccccattctcctgcctcagcctcccaagtagctgggactacaggcacccaccaccatgcccggctaattttttgtatttttagtagagatggggtttcactatgttagccaggatggtcttgatctcctgacctcatgatctgcccacctcggcctcccacagtgctgggattacaggtgtgagccaccgcgcccggcccacatggataaactttgaaaacattttgctaagtgaaggaagccagccacaaagactacatactgtaggatggttgcacaactctgtgaataaactaaaaaccttccaaagggtgaattttatgatatgtgaattacatctcaattaagctgttttttaattaaaagtttattccatctctcaatggtaccaccagtctgaagataatgaattggctaccaaatactttgactataagcccattgttgatgagtttttgcactaaaaaatgcagtattatcaccatccagaaagccaaaatcatgacacagattagtttcaagggccacaatgatgtggccacaattggctgatcagactagaacagcaaaaccattacctgagaaaaagtcaacaggaatgagataccagtggaatagcttggaagaggtcaaaggtctgatgtcaccaatttaccaggagccagtcaacactctgcagccagtcaacactcagtgcaatatggcctctttcaccatgagacaaataggctaacttttggcagaggtcacaaatctggcatgtagtggtagcttctgattcagaaacacagagtcccttactttgtgcccagttgatgatggtgtcaccatgtccaatgttatgatggatctaagtggcaactgtggccatctgagtggcacaagcttgatcaaaagcttgattctagttggtctcatcagagaatgagcccttaccatgcacaccacaacagtgatccagactgtttggtggctacaatttgtttccagggctcatgacccaaagtgaagtgcctttaatctgccagtctgtaatcttctaagtagcagacaagaccactagtgcctaagaatcagtaaaaatatagcataactagtcagtcctaagggaaaggtgatagcttttgttttagaccattgtgctaattgacccttaatgcagtaggtcttccagagttgtggttgaggccaggcatccagtgggcgctatcagctttctttctttctttttccttttctcttttcttttcttttctccttccttccttccttccttcctttctttcctttctttcttcctcactctgttgcccaagtgtatatgacggactgcatatatgacagtggtcctataaaccagcctgaccaacatggcgaaaccccatctctactaaaaatacaaaaattcgccgggcgtggtggcaggcgcctataatcccagctactcgggaggctgaggctgaggctgagccaggagaatcatttgaacccaggaggcagaggttgcagtgagccgagattgcgccactgtactccagcctgggtgacagagcgagactcagaaaaacaacaacaaaaacaacaacaaacagtttactgtaaaacagtatgtcatgttatacccacagtatcctcatatatttcatgtttaccgcatctcttgtttgcacattattttctctcgcatttgatttaatcttgtgttgtttttttcatcatagctcctaagggtacaaaatccatggctaatgttgccagtaagaggccacatcaagtgattgacctggaaatgaaatttaaagtaaaagtcagtgatgattattgctcaccagtcaggcatatcccattccaccatagctaccatcttgaagagcaagagcaaagtgaccgaagctgttaaataatctgcttcagccgggcgcagtggctcacgcctgtaatcccagcactttgagaggccgaggtgggcagatcatgaagtcaggagtttgagaccagcctgatcaacattgtgaaaccccgtctctactaaaaatacaaaaattagccaggcgaggtggcaggcacctgtaatcccagctacttgggaggctgaggcaggacaatcgcttgaagcggggaggcggaggttgcagtgagccgagatcatgccattgcactccagcctgggtgacacagtgagactccatctcaaaaacaaagaaaaaagaagaatctgcttcactgaaggcaatgagactaacaaaagttcacgaaggttctatatgggatatggagaaacttctaatgacctagattgaagaccaggcaacagaagtatatctttcttagcacgataacaatcatggccaaaacaaaaagtttgtttgtgatgttgaaagaaaagtctggctgggcatggtagcgcatgcctgtggcccctactactcaggaggcaggggtgggaggattgctagagcccaggaagtcgtggctgaagtgggctcatgataatgccactgcactccagcctgtgtgacagagtgagactctgagaaagaagaaagaaagaaagaaagaaagaaagaaagaaagaaagaaagaaagaaagaaagaaggaaggaaggaaggaaggaaggaaaggaaggaaggaaggaaggaaggaaggaaggaaaggaaggaaggaaggaaggaaggaaggaagcgggagggagggaagaaggaaggaaggaaggaaggagggagggagggaagaaggaaagaaggaaggaaggagaaagagagaaagagagagagaagaagaaagagaaagaaacagaaaaggaaggaaggagagagagaaagaaagagaaagagaaggaaggaaggaaggagaaagaaaggaaaggaaaggagtggaaaggaaaggagaggaaaggagaaaggagggagggagggaaaagaaagaaagaaagaaaaggctaaacctgactatgatattgaatttactgctagctctaggtggtttaaatgattcaagaatcatggccatggctgggcgcagtggctcacgcctataatcccagcactttgggaggccgaagcgggcagatcacctgaggtcaggagtttgagaccagcctggccaacatggtgaaaccctgtctctactaaaaatacacaaaaaaattagccaggcatggtggtgcgtgtctgtaatcccagctacttgggaggttgaggcagaagaatcgcttgaatccaggaggtggacgttgcagtgagctgagattgcaccactgcactccagcctgggcaacaagagtgaaaactctgtctcaaaaaaaaaaagaatcattattcagcctggcacagtggctcacgcctgtaatcctaccactttgggagtctggggtgggagaattgcctgagcccaggagtttgaaaccagcctaggcaagatggcgagacccccatcttaaaaataaatcattatgcattatataatgtgaatgtgagagagcaatatgcaagtgctgatacgaaggcagctgaagaattttgggaaactctagataaggtgattgtatttgcctgggaaaatcttcttgagttttatagtttcaggtcttattaatacatttaggtctatgattcattttgggtaagtttttgtatatggtgttaggtaagagtctaacttcattgttttgcatgtagatatccacttttcctagtaccatttgttgaaaaaaactcttatttcccccattaaatggccttgacacctttgtcaaaaatcacttgaccacacatgtaaaggtttatttctgggcctttatttattctattatgggtttatttattctattccatttttctacacatttgtctttatgcaagtaccacactgttttgattactgtggctttgtagtaagttttgaaatcaagaagtgtgagtcctccagctttattctttttcaagattattttggctatttggggtcctttgagattccatacaaattttagaatgggttttttttctatttctgccaaaaaaaacctcctagagattttgttaggaattgtattgaatctgtagattgcttatatttatgtcttatttaatttctttcagcaatgttctatagttgtcattgtacacatctttcacccccttggctatgttaattcctaattcttttgatgcttttgtagattgaatcattttcttaatttccttttcagattgttcattgttaatatatagaaatgtaactgatataactttgtatcctgctactttgctaaactgatttattagttctaacagtgttttgtggaatctttaggcttttctacatttaagatcatattatctgtgaacagagatcattttactccttcctttttaatgcggatggctttgctttcttttccttgcctaattgttctaggtagaacttccagtactattttgagtagaggtggtgaaagcaggcatctttgtcttgttcttgatgttggaggaaaatctttcattctttcatcattgtgtatgatgttggctgtgggtttttcatatatggcttttattatgttgaagcagtcctcctattcctagtttgtggagtgtttttttttatcatgaaattatgttagagtttgtcaaatgcttttcctgcatcaattgagataatctgatataggattcttggttgacagtttttttctttcagaactttgaatttgtcagcccacagcctctggcctccaaagtttctgataagaaatctgctaatgattttattgaggatttattgtatgtgatgagtcgcatctctcttgctgcttccaagattttatctttggttttggctttcaaaagtttgattataccgtatctttgtgtggatctctttgagttcatcttacttggagttcattgagcttcttggatgtttatattcatatctttaatcaaactttggaagtcttaatcaatgtttcttcaaatattctgggtttttttctctcttctccttctgggatggctagacttctgagagaatgcatatgtttttctgcttgatggtgtcccacatgtcccttaggcagtgtttacttttctccaatcttatttatgttcctcagactcagtaattttcatggttctatcttcaagttcattgagtctctcttctgtctaatcaaatctgcctttgaatccctctagtgcatttttaaattttggttattgtactaatcaatactacaaaaagttcttgtactttctggtttctttttaggttttccatatctctattgatattccccttttgcttgtacttgtttttttcactctccacatcttcctttagttctctgagcatctctaagacaattgttttaatatatttgtctagtaggtctgccatgaggactttcagagcttctgttgacttttttcctttgaatgtgccatattttttcttttctttgtatgccttgtgattttttggttgaaaactagacattttagtttaataatgtggtaactctagaaaccaggttctcccctttcctcagggtttactttattttgttactgttttttgttattgttgatgtttcttttttattgttataggctatctctgtgccaaggacactttgccatccaagccttcacctagaagttgcaagccttcaatagactccatggctttaaaatagttacagattctgccagtacaagttttggttaggtaaggaaacagaatcctagagcttcctactctgccatcttcccagaatactttcctggctaattatttctaagggaataatttaagcccccaaagacacctgggccaagtctttctctagaaacttgatatcttttctgctttctttccctgctttttcttttccacttagttccactcccatcccccatctcaccacctaatatccatcagactcagtatgttcctcttctcctcccaaccccatgttcaaatactttttttttttttgagactggcccaggctggagtgcagtggcacaatcttggctcaccgcaacctctgcctcccaggttcaagcgattctcctgcctcagcctcccaagtagctgggactacaggcacctgccaccacacctggctattttttgtatttttagtagagacggggtatcaccatgttggccaggctcttctcgaactcctgacctcaggtgatccacccacctcggcctcccaatcaaattctttatccaaagccttacttggtgggtcatataatgaactaaaatttggaaaacattcacatttgtggaatgcttcagagttttcaaggcgtctacattatctcattggatcctcttttcagcccagtgtggttggtagatgagatagcagtgttcagacagtttatgtgacttgtccaagatcagagagaaagtaacaaagcctaaactggaatccagatctcctgactccctattcacttatctttccagttgcccttgtctctacaaatcaccaaaagaaattggttcctagaaataaggataatgtaggggtgtgccatcccctatcccactcttctgcacccatcaccacgaaaacagacaatgtttattgcagggccccatattaacctactttcttctgcagagcctctaagctccacattatccaggaagcaatacattgtgactgttgaagtcaaaataaaacatagcgatgaatctctaactttaaagcattctattttggaagcaaggattgcagtttgaggcatacacactaaccaggtggtcttcagtgtgtctgaggaacagaaagaaggttgggagttttattagagaaatgttctatactgttttgaaagaaagctcattggcactaaagaatcatttggaaagaagggaaaaaaagagaaaaaagaagcatttgggagctggcaaactctgattggtgagtgatggtggtaggcaaaactattcttaaagtcatgtttcagcagctactaaactagtcttggggttacagcaggccattttagcagctgggcttgtgaaaaatttaattcatggagcaggtgctgtgccccaagtgcttcttccctcctggtccctagactctgatttagttgggtatgacaagaatgacccagtttgtgtgatcagctttcacataaccttgtaaattctagttgatccaaggaaaaccaactaagtaaggagaagaaaagaactgcagcgtcatagtttttgagtctgtgtaagtacagccctttgactgaaatctgaaaattatgagaccaatattcctgcaaaaaaaggtcccaaagagattttactaataaggtgggctgggcctcagcaatctgcccatcaagagtttagcttctccaccaactactccttaactcacccggaatttctgaaacaagctgaattagacccttctttggcaggacttgtttttctaggttaactcaattagactgttttattccgtctcttgggatccattctgaattaaattttcattaaactctgcccttggagtatccttgatgcaaccacttcccttccaatcccttgtaacctcaatgtcaacatcaattccaattctaaagaattgggagaaatatgggaagaacagaccacaagacttctggcaaccagaatgagtatgaaggcatgacgtttgcttggctgaaagcaaagagatgaggtggggaagccagctctgggagatcctgggatctttaaaaaatctcagagcaacacgccttgcctctgctatccacggacaggaaagacgctctgctttggcgacccttagaggggctaatagaggcacagtcacttgcaccgtaaataggaggaaacaattttcttttcttctgccgcctatagagattctattttcttctctaagtttaacttttatatgaactgggttgctagagagctcctttgtaaaataaaggataaccctttaccttttgcttcttttgtaaaacctctcttgatctgcttgcagctgcctttcagctgatgaaacatttcctattttcactgtggatctgaaagaaccttcctgcctgtgagatgtggtgaagtttgaaataattttgtagtatgattggttgttttcttgttcttgtctttgaagttatagatgagcaagcagcaaatctctacagctgcaaggtgaaaaaggaagttccttggcctgggctctttgcgggaaagcatgtgagtttagatggcaactttaatctgctttcaggagtgaagctgctgctactttggaaagttgaaaggacttaacagttatccctcctttcttggaaagttaaacagatttttttgattcacttttgtgggtcagagtagttaagaggagttcagtgtgaagaaagcagttgatcttttgctaactagtggcttctttctctttactctgtgccttttccattgcctagcagtaaacgaataaataaatatatctatatgtatatctaagaaagaagtactcctaaatatcgaccctgaccccaaagtcacactttaatgcttctttaaatgtcttcagaaagttgcttgtggtttcagatttctaataactcttacagagcagaatttaggatttagggatcagtctgcacgtgtagcatttgttcatttcatatttattagagatgaaacagatgaccaaaattccatttattgcagactctccttttcctttgtaaatgtttgacttttctgaatggatatccatattcacacattttaatgcccattaaaggaagctcaggttaatgttttcaattgtaggtgagttcgctctgcttcagtgatatggaacattttgttctgctgtttccattggaggagattaaagaggctaaatgggatggcatagtgaagtcatttttggtttcctttttaaaatttttattttattttattttattatttttattttattttatttatttacttatttatttttgagacggagtctcactgtcacccaggctggagtgcaatggcatgatcttggctcactgcaacctctgcctcctgagttcaaacgattctcccacctcaggctcctgagtagctgggacaacaggcacacaccaccacgcctggctaatttttgtatttttagtagagacagggttccactatgttggccaggctagtctcaaactcctggcctcaggtgatctgcccacctcagcctcccaaagtgctgggattacaggcgtgagccacagcacccagccagtcattttgggttttctttggttattttggatgccttactgggacccactcaaaaaacaaacaaacaacaaaacaaaacaaaatgaaaaacactttcataaatgtctgtctcaaaaccttttctactttctccaaatagaactaatgcatacatattcttaagatttgctcagctatatctccttggttctgacttaatcctcttctgcagaaaatttcatctcacatcaaagcctcttccctccttctgctgtaaagttgttgagagctgtcacagactgtcagctcagcttcagctatgcttaatgagtgcttgtgcagaatgcaccccaggtaaaggaattcagaaatcaaaagacatgattactgagaaggagaaaaggcagagaagtgatttctggagagcataaacaaaaccaatatagtacccactaaggtctttgttgagtaatgatagataaaacagcctaaagggaatgatgtcaggagatctaaaacaatcatttagcatcgcctatcagcattgtattccttgtacactgtgggaatgaacatctgggaagcctagactctgacccctgtttcagtggaacagggagacagatttcacactgacaaacagctgcctgaaggagtcttgtccttttgtcccttgagaagggacacagcctcaagtcttctctcaagttctaactcaggacccctcaggcagtctgggcctgccatatggttcttggtctcaaagaagagttctgaagcaggttgtctacagaagattcaaaccacccattaaaatattattcaatttggcatctgttaggcataacaattagactagccaattcagtcacaatagtgaaatcggtacgtgtatgtagatacagcccaagagatcaaataattttagtgttgttaagaaaaaattattctgaatttttttttacacaaggacaattttaatcctgcattttcctgtggtaacatccactgctggctagctatggattgaaactgcatttgctaagaactgtggagcacatgttgatacaggcacacagacatctgccagcaccaacagaatacatatgtaacacataccagatagtctcgatggataaatttgctccaccagtaattctatttagtagaattcacagttaatgcagaatttcatttttaaattttacatctttctaatactttacatttttctaatattgtatttaaaaaaaaaaaaaaaaaactgtctcgccgggcgcggtggctcacgcctgtaatcccagcactttgggaggccgaggcgggtggatcatgaagtcaggagatcgagaccatcctggctaacacgatgaaaccccgtctctactaaaaatacaaaaaaattaaccgggcgtggtggcgggcgcctgtagtcccagctactcaggaggctgaggcaggagaatggcgtgaacccgggaagcggagcttgcagtgagccgagattgcgccactgcactccagcctgggcgacagagtgagactccatctcaaaacaaacaaacaaacaaaaaaactctcattcaagatcgtaatttgcatgacaataaaccatggttttgtgggctctaagtttcttagaagtgtccgcagcaatttagaacaaacaccgcaagtcttccttccaatttgcagcatctgatttaaagtttaaattcatctaatgcatcattaaaactgtcatttttacttctcttgtcattaaaacttctcttgtgagaagacatgtttcacttgctatttccaggactacatcttgagcatgggtgtacagtatttttcattggttagcagaattttactcacataatttatagccagaataagaacctctagcctctctgaatggccttccactcagaacaatgatgatgattaatgtctaaaatgtgtctgaggtgcccgcctttgacattaccaaaatgtttccaagtaatcttagaaaatatgattctttaaacatatgcgtaatattctaccacacaatgtgccatcacttgtttaatcattttccaattgttcatttgtaacatttgcaatttttcattataaataatattgtgatgaatactttcatccataagttttacgcaaggctggttatttcttctaatgtcttctaatgtcaaagaagtggcttactgtttcaaacagcgcacattcatggttttaaggcttttagcatactttatcaaataatctccagaatagctcgaacaactcctaccaacagtatgttattgtgcccgtagggtggactttgtaacaacaaagcaaattgaaccacaaatttattagattcacacccatctcaaaactgtcacatcaatgaagcaaggagacgtattactggttaggaagccaaattcaaattatttttaaaaatcactcagctttagatcagtaaaataatcaacaaaaatgctccacataaaaagtctaccgggtttttcaaaaaataaaaagacaaagagagagtcaggccgggcacagtggctcatgcctgtaatcccagcactttgggaggccaaggtgggcaaatcacgaggtcaggagttcgagaccagcctggcaaacatgatgaaaccccgtcgctactaaaaatacaaaaattagctgggcgtggtggcaggcgcctgtaatcccagctactcaggagactgaggcaggagaatcgcttgaacctgggaggcggaggtggcagtgagctgagatcatgccattgcactcgagcctgggcgacagtgtgagactctgtctcaaaaaaaaaaaaaaaaagagagagagacaaagagaaagtcagtaccaaatgaccaaattttattttatttttttagacagagtctcactctgtcacccaggttggagtgcaatggcagatctcggctcactgcaacctccgcctcccaggttccagcgattctcaggcctcagcctcctgagtagctgggactacaggtgtgcgccaccatgcctggctaaattttgtattttttttggtagagacggggtttcaccatattggccaggctggtctcgaactcctgacctcatgatccacccgccttggcctcccaaagtgctgggattacaggcgtgagccaccacgcccagcaaatgaccaaaattttttatttgactaaattctattcatgcatgagcatgacagtctccctgtttatttgactttggcaattaaaaaaacaagcaaccttgtacaaaacagtgaaaatgccaaggacgagggcagtctacagttttactgtagaatatatatatattctacagtaaatatatatatatgtatatataaaggcctctctccctttggccatatcaactctcagttcaggccattaaatacagacaaattttcaaattcacttctttacttctccaagatctttgatgctgtcatcatctacttctggccatttttctgaatgacatgaattatgtcatctgtaaagtctccccgaataatttcatcctccccattactgaggcagcacaggagaatttttgagcaaaaatctttgtgcttctttaagatcaatttcaaaagttgcaaggccacacactcttgtcacatgtttcttctttgctctaggaattttggccttagtaagcttttgtggtatggtcttctttttttgttttatttggcctcttccacctctcttctgttttttcttctcctcttcttcccctgctgttccttgaccctcactaattccagcttcttgtttgggtgaattttctacagtaaattttgcaagttcatttagaaaattcttctctaaccattgtttacaatgagcaacatcaggcatatattcacagtactctgttggtaatgaacagactccacaataaaggactcgaagtgggtaattggcatctaacttggcactgttccttgggtctcctttgcaatcagccccactggattcagaaatctcagctcactgcaacctctgcctccgggctcaagcaatcctcccacctcagcctcctaggaccacaggcacatgccaccatgcctgactaattttttgtatttttggtagagatggggtttcgccatgttgcccaggctggtcttgaactcctgacctcaagtgatctgcccacctcagcctcccaaagtgctgggattacaggcgtgagcccctgtgccgggccttcatcttttatattttttaaaattgcagataaacttgaagctccctttactgattaactccaattcccacaactcttctatttatttcttttcctctgtacttttctcctctctcctttccttttctgcctgttttatactcctctctttaatttaaaaacctagtgagtttaacattttatgtttttagttttttttgttttagttgtcattgttgttggtttttgtttttttgttttttgttttttgttttagacagggtctcactctatcacccaggctggagtgcagtggcatgatcatggctcaccacagcctcaacctcccaggcttaggtgatccacctgcctcatgctttcaagtagctgggactacaggcatgagccaatgtagcccgttgtgtttaacattgtatatgcctctctcctaaatagctatttttagaaaagactgatttaaattgatatttgcctcacatggtcctcaattgaaacaggtttccatcttattacgaaagctatgattattacattatatgatgcttttttttttttttttttgagacagagtctccttctgttgcccaggctggagtgcaatggtgtgatctcggctcactgcaacctccgcctcccgggttcaagcgattctcctgcctcagcctcccgagtagctgggattacaggcacatgccaccacgcccagctaatttttgtatttttgtagagacgaggtttcatcatgttagtcaggctgtcttgaactcctgacctcgtgatccacccacctcagcctcccaaagtgctaggactacaggcatgagtcactgtaccctgctgatgctttttcttatatgacttttttttttgagacatggtctcattctgttccccaaactggaatgcagtggcacaaacacagctcactgcagccttgatctcctagactcaagtgatcctcctgcctcagcctcccaagatagctgaaactaccatgcccagctaattttttaaatttttgtggagatgaggtcttgccgtgttgcccaggctggtctcaaactcctggtctcaagcaatcttcctgactccacctgccaaagtgctgggattacaggcatgagccatggtgccctgtcttgtatgacttttaaattgcccctgaaggccgggcgcagtggcacatgcgtgtaatcccagcactttggaaggccaaggagggcagatcgcctgagatcaagagttcgagaccagcctggccaacatggtgaaacactgtcgctactaaaaatagaaaaattagcctggcatggtgatgggcgcctgtaatcccagctactcaggaggctgaggcagaagaatcgcttgaacccgggaggtgaaggttgcagtgagccaagatcgcaccactgcactccagcctggtgacagagcaagactccatctaaaaaaaaaaaaattgcctctgaaggtatgtctagaattcaaagatattttaagctacttgcagcattagaatgaacttatgacatctcaatattacaactttggggaaaaacattctactgactgtctcaattctggttatattagctaaaaactaaaaccacttttaagttataaaaatcccattacttaggccacagctcattttcagtcaaaaacattattattcttaccagagttagctggaaatcattgtctattttcagaggtcagatttattctcagagggcaaatcctcaccataaaagaaatattcaggtcaggcacgatggctcacgcttgtaattccagcactttgggaggccgaggaggcagtgtctcttgagcccaggagtttgagaccagcctgggcaacattgtgagacctcacctctactaaaaaaataattggcctggtgtggtggctcacacctgtagtctcagctccttgggaggctgatgtgggaggattgcttgagcccaggaggtcaaggctgcagtgagctatggtcttgccattgccttccagcctgggtgacagagcaaggccctatctataaaaacagaaagaaagaaatattcagcagaatatgttgtagcctctctgaaggggatgccactcatttggaataacagcaattcaacgttcgaagagaacttaaaaatctaataattcatcagcctgggcaacatggtaaaaccccatctctaccaaaaatacaaaaaaaaaaaaaaaattagccaggtgtggtggcacatgcctgtagtcccagctactagggaggctgaggtgggagaattgcttgaaccctgaaggcagaggttacaatgagctgagatggcaccactgcactccagcctgggtgacagagtgagaccctgtctcgaaaaaaaaaaatctaataatgcaaattttttctcatacaggtgaagaaaaagttatccatagagagaaagtaacttgccagaagtcacacagggagctagtggcagggctgggaccagaacccaggtttttacatgctggttcattctttgactccccaaacgcattcccatcccccgcccccaatcccctatctcctcgcctccactgagatatccgatgcccagagccctggttagacagctgaaggtgatgtctataagcagtctcattattatatgacttactgctgaaactttactgagtgtaatgtaatgtttcccctaatccgcaaacttcttcataaccactgtgtcatatgatcagtgtcaactttctcaatcttgtaaccacagctggcttcatgagcatgcagcttgtgtagctgcaccaggcctcgtgcttaaagggccaatggcttggtttaatgctctcctgtcaccatctcttaattttttaacaaggggtcctacatttcatttttcacagggcctggcaaattgtgcctcaactctaacacttccccctcctccttttgttagttacttgtctctcttccctgcactgaaagccatttaaaggtagggcatccgttattcacatatgcagaacataaagcaacttgattcagtttttcagggccagagaacccattatggacccagagaaagctatggaccctctcccctgaaaaatcacatatgcacagtgtttcacagacaatttcaaggtcaagaattccctcttgctctatcatttccctttcttcccaagtatatgcttttttccaaaagcctgatcaaaggaaagcctgccttcatcttaactaacctgaatgagtctgctgaagtctgcagttgctcctccatgctggggtccagctgatacttcttgatctgtgttcactgtccttcacagggatgagctttaccaagaacccccaggtctctggccattggtgcttggcagggctggtggaagccactattatgactaactgagcccagtcacctcccctccaatgccagcttgctggctacccagacactctggctgccttgactagtgccactagcaaagcccagggcaggctgtcagagttgtgcctcatgaacacctagtatggtcagcagctgacactgttcactgtcttcaagaagactacttaaacaaacaaacaaaaaatactaaaacaatgctaaaataaaaattaaaaggggagccaggtgcagtggtgcccctatagtcccagctacttgagtggctgaggcaggaggatcacctaagtccaggagtttcaggccagcctgggcaacacagtgagatcacatctcaaaaaaattaaaaaggccgagcacggtggctcacacctgtaatcccagcactttgggaggctgaggcgggcggatcacctgagatcaggagtttgagaccagcctggtcaacatggtgaaacccgatctctactaaaagtacaaaattagccgggcgtagtggtgcatgcctgtaatcccagctactcaggaggctgagatgggagaatcgcttgaacccgggaggtggaggtgcctttgcctcttcttccattctcatctctcactacacctctgtctcagtaggtacttagccatgccacatgactgggagactgtagtcctttcctttgctgtggggaacaaggccttatccctgaaggattaagatacaatactctccccagtgctgtcgctaaggggatgccttcagtgcacactcaggacgctgagtgtaccctactcagggatgatctcaacactgttgtctcttatattccctcaagcagagatcttgcacattagcatacatgtgtgcacgcacgtcaacaagactcctgggttacatcaaccaattgcactggacctgtacaaaccctcattgctgttactactcatgaggaacacactcactgctattaatacaattgcagtgggcttgtacaaactttccatgactttccatgccctcttttccacaacttagtcagattcagtcacacttatgcatttgtaaattcttcagctcttaaggaaacataataagtgacccttataaatctttctctgtgtaactttttttttttttgagacagagtctcgctccgtcgcccaggctggagtgcagtggcgtgatgtcggctcactgcaacctccacctccccggttcacaccattctcctgcctcagcctcccaggtagctgggactacaggtgcccgccaccacgcccggctgatttttttttgtattttttaatagagacggggttttaccgtgttagccaggatggtcttgatctcctgacctcgtgatccgtccgcctcggcctcccaaagtgctgggattacaggcatgagccaccgcgcctgaccttctctgtgtaactatttaagctgcccagtggcacaatgacagggaggcaagaattggaaatgaggaatttgctatgttctgaatgtttatgccctctcagattcagatgttgaaatcctcactgccaaggttatagtgtaaggaggtggggccttttggaggtgactaggtcatggtggcagagccctcatgaatgagactagtgcctttacaaaagaggcccaagggaaagcccttccaccttgtgagattagagagatgatggctgtctatgaagaaataggccctcactagatatcgaatctgcctgcaccttgatcttggacttcccagcctccagaaccatgagaaataaatttccgttgtttagaaaccacccagtctatgatattttgttatagtcacctaaacagactaagacaggattcatagaattaaggatagaaggtagattctttcattcatataacaaatttttgtcaagtttccactctgtgcctcagactctatagtgagtcatatagtcctatcctcttatgaagggggcctgcccctccacacctgtgggtatttctcatcaggtgggacgagagactgagaaaagaaataagacacagagacaaagtatagagaaagaacagtgggcccaggagaccggtgctcagtatacagaggacccgcactggtgccagtctctgagttccctcagtatttattgattattatttttactattttagtgaggggagtgtagcagggcaacaggtggggagaaggtcagcagggaaacatgtgagcaaaggaattagtatcatgagtaagttcaaggaaaggtactgtgcctggatgtgcacgtaggctagatttatgtttttctttacccaaacatctcagtgtagcaaagagtaacagagcagtattgttgtcagtatatctcccctctagccacagggcggttttctcctattttctcctatcttagaataaaatgaatgggaatggtcggctgtacactgagacattccattcccagggaggagcaggagacagatgccttcctcttatctcaactgcaaagaggcctccctctttcactactccccctcagcacagaccctttatgggtgtcgggttgggggatggtaaggtctttcctttcccacgaggccatatctcaggctgtctcagtggggggaaaccttggacaatacccaggctttcttgggcagaggtccctgcggacattgtgtccagtgcattgtgtccctggttaatcgagaatggagaatggcgatgacttttaccaggcatactgcctgcaaacatgttaacaaggcacatcctgcacagccctaaatccattaaactttgattcaatacagcacatgtttctgtgagcacagggttgggactaaagttacaggttaacagcatctcaaagcagaaacaatttttcttagtacagatcaaaatggagttttttatgtcttccttttctacatagacacagtaacaacctgatctctctttcttttttttttattttttttttagacgaagtctcgctctgttgcccaggctggagtgcagtggctcactcagctcactgcaagctctgcctcttgggttcacaccattctcctgcctcagcctcccgagtagctgggactacaggtgtctgccaccacgcccgcctaatttttttgtatttttagtagagacggggtttcaccatgttagccaggatggtcttgatctcctgacctcatgatccgcctgcctcagcctcccaaagtgctgggattacgggcgtgagccaccgcgcccagcctgatctctctttcttttccctacgctcttatttttattttattttatttatttatttatttatttatttatttatttattttttagagacagagtcttgctccgttgcccaggccggagtgcaatggcacaatctcagctcactgcaacctccgcctcccggttcaagcgattcttctgcttcagcctcccaagtagctgggattataggcatgcaccaccaagcctggctaatttttgtatttttagtagagacgggtttcaccatgttggccatgctggtctcaaactcctggcctcaagtgatgcacccacctcagcttcccaaagtgctgggcttataggcgtgagtgccgggcccttaaaactgagaaagctgagacctaggtggacctagggtcaggcagccatttaaatgacaggttcatccaagtgatctgactcgtgtgtctggatccttctttttatccaccatgctgaagagaaactcatcttaagtcctaaatacagatgatgaatttaaaaggagaactgtcatcagagatatcacacatcaaataacagtcttcatcattgcagagtggaaagacagttgagaaacccagttacacagctactcattgctgtcagcattattgtcctgtttttttgttttgttttgtttcgttttttttttgagacagagtcttactctgtcacccagcctgcagtgcagtggcacaatctttgctcactgcaacctctgcctcctggattcaagtgatgcttctacctcagcctcccaagtagttgggattacaggcatgcgccaccacacccagctaatttttgtatttttagtagagacgagctatcaccatgttggtcaggctggtctcgaactcctgacctcaggtgatccacctgccttggcctcccaaagtgctgggattataggcgtgagccacagggcccggcctagcattattgtcctgtattaatagcagggagtgtgtttctctaatgagtaataacagcaacaaggtctgtacagatccaaaaacgtttacctgtaattgcaaaatcccaacaccctgaaaagtataaggttttgttccccctttggcaactcatttggcagcaaaatctgaacttacctgaagacatttggcaacaaaacccgtcccgaattgatgtgaatcaattcatagtctgtattcatcctgcctattatgaagatccatgcctttttgctatagaagcattaatattttcattatagggttctcccagaccccttatatgtggtttaacataatatatggatgatactatttttctaacgttcacaaagttctgaattctaaaaaacatctgaccccaagaatcctaatacaactaaacattatggacctgtattacatttagaatatacatatccctccagaattgaggtaaggaatactggtctttaactttctccctattatacccaaataagatttactccactgagactttaccaatccaagactcagtccaactgtatggttctaccaggagaactgttttgccgggggttggtctgtttgtcttaaactaacccctaggattcacttttcctgagttaggctggggatttgacctggtgagatctcctgcctacccattgtgcagtgaatagtgtttacattaggcttatggctgctctgatggtgaactgagcttgtacctacattatgaagtgttcagagcaagtgatcactgtggactttggccagtccatggacatccagtcccatggatattggcctctggtcatgagctgtcccactaccccttggatttgtgaatattgaactggactgttgattcagccccctcgttctcaatcctgttcctgggtctaacttaatcttccccaaactcctgccacctttttctttcttcctttcttttcttttttggtatgatcacagctcactggagcctcaacctcccaggttcaagcaatcctccctcccacctcaccctcccaagaggctgggaccacaggtgtgtactatcacacctgtgggtggcaagccacgcaggtgccaaggcaagagaccgagggcacaagctgctccagtataataaagaaaatatatagaataagaatagttatactagaaatagattatagatgtgattatatatgaatatcattaatcattagtttgtagcattactctttattccaatattataataatctttgttctacaattataacctaggaaaaaccaggccatacagagataggagctgaagggacacggtgagcaagtgaccagaagacaagagtgtgagccctctgttacgcccggacagggccactagagggcttcctggtctagcagtaatgccagcacctgggaaggcacccattacctagtggaccttggtctagtggtagcatcagtgctcgggaaggcaccggttacttagcagaccgagaaagggagtctccctttccccgggggagttagagaagactctgctccaccacctcttgtggaaggcctgacatcagtcaggcccacccgcagcctccagaggcctgaccatctccctgtgatgctgtgcttcagcggtcacgctcctggtccgctttcatgttccaccccgtacacctggctccgccttctagagagtggtagcagaattagtaaaagtactaaagtctttgaaatgcatagaagaaataatggcataaactgtcctctctctccgcctcggctgccaaacagggaagggcctcctgtctggtggacacgtgacttgtgtaaccttatctatcactggagatggctcacactccttaccctgcccccttgtcttgtatccaataaataacagcacagccaggcattcggggccattactggtctctgtgccttggtggtagtggtcccccggacccagctgtattttattctgtctctttgtcttgtgtctttatttctacgatctctcgtctccacacatgaggagaaaaaacccacagacccagtagggctggacccgataacacccggctaattttttaaaaattttttgtagagatgaggtctctctatgttgccaggctggtctcaaattcctaagatcaaggaatcctcctcctgtggcttcctccagtgctgggattataggcgtgagccaccatgcctggcctctttttctagctcagattttccggccactctcacttctttgtagaaattcccattacagtttttggcccatgagtatattatttatggtaaggaaaacccaaagacacaaaataactacacgtaccgcctcctaatttataacatgcctcttgtaacttgccttaatcgagctcatttgtttttgtttttgagatagagtctcactgtgttgcccaggctgggtaacagtgcagtggtacaatcacagctcactgtagcctcaacttcctggggtcaggtgattctcccacctcagccacccgagtagctgggaacacagtcttgtgccgccactccctgctaagagccttttgttaatcagagcttcccaccacattccaccacatctccatcctttactttccttgttttttaaagttgaatttctttctttctttttctttctttctctctctctttctttctcttttttttttttgttttttgttttttgttttttgagacagtttccctctttcacccaggctggagtgaagtggtacgatctcagctcactgcaacttcctccccctgggttcaggcgattctcctgcctcagcctcctgagtaggtggatttataggcatctactcaggaggccaccacctggttaatttttgtatttttagtagaaacggggtttcaccatgttggccaggtcgaactcctgaccccaagtgatccattcgcttcagcctcccaaagtgctgggattataggcgtgagccaccagcccagccgggttgaatttatttctaatttgccttcctaattaatacccattaaagctagatgctgttatttgaaaaatggtctttttagcaacaatcagaagctaaaaattaaaaacaatattgcttttggaagagatcaatgatacagaataaaaattttaaatatatatttaattttatgtaactaaaatattatctagtttacaaatatttcatatttctattccaaatgttactgtattgaatctttatgaattctagacagcatgatataataataagtttcaaaacattatgataactattcatgatgtaatttttcctctgcctccacaatccaagtttaccagtcctagctcttgtctcattaggacccagtcctgtactaaaacaaatctgaagtctgataaattaatgagaaatattattggcacattagccttttaataaaggtcatcaatatcttttcctgaagaaatagttgggctgggtgcggtggctcacacctgtaaccccagcactttgggaagccaaggcaggcagatcacttgaggtcaggagtttgagatcagcttggccaacatggtgaaaccttgtctctacaaaaaatacaaaaattagctgggcgtggtggcaagcacctgtagtcccagctactcaggaggctgaggcaggagaattgcttgaatccgggaggcagaggttgcagtaagccaagatcgcaccactgcactccatcctgggcaacagagtgagattccatcttaaaaaaaaaaagagagaaagaaagaaaagaaatagttaagtgctccatcggttagtagatattgatggagcaaacatgatgttcttattccaatccatcatgattcttacaatctagacggagttggcaaactttttctgtaaaaggccagataataaatattttatgctttgtggaacacatagggtctccgttggatattctttttttttttttaatagaatcatttaaaaatgtaaaaaccattcttatctccagactggataaatgccatatgaaatgtgagaagggcaaataagtactgtagtcactcatttgggctttgatgaccattaacaaatgataagtaaataaatgtttgtatagcaagctaagcactgcgatcagtgggaaaggacaagcatcatatggggaccaggaagtagccaagcttggatggaatttattacttcctgtgagaaaatataaagctggaaatcatggtggagagcccctgtcattgaggagttaatatcttagaagggggatgccatatatatatatatatacatactatatatatatattatatatattataaaatatatatagtatatatatactatatataatatatgatatatataatatatatagtatatatatagtgtatatataatatatgatatatataatactatatatagtattatatatatagtgtatatataatatatgatatatataatactatatatatagtattatatatatagtgtatatatatatacacacatacacacaaatgaacaaatatggctgagtggtggctcactttgggaggcttaggtgggaggatcacttgagcccaggagttcaagaccaacctgggtaatagagtgagccttcatccctacaaaaaaaaatttttttttaaattagccaggtgtgtttgcacatgcctgtagtgccagctactcaggaggatgaggtgggaggatggcttgagcctgggaggttgagactgcagtggcccaagattgtgccactgcactccagcctgggtgacagtgagactctgtctcaaaacaaacaatgacaacagaaaaaaactatatgagcttgagttagaaaatataggccaggtgcagtggcagtggctggcggatcacttgaggacaagagttcgagaccagcctggccaacatggtgaaatcccgtctttactaaaaatacaaaaattagccaggtgtggtggtgggcacctgtaatcccagctactctggaggctgaggcacgagaatctcttgaacctgggaggaggaggttgcagtgagccaagatcgtgccactgcactccagcctagctgacagagcaagactctgtctcaaaaaaaataaaaagagttagaaaatataaaatgcttagtctggccaatgtggtaaaatcctgtctctacaaaaaatacaaaaattagcctggcatagtgatgggcacctgtagccctagctactggggcaggagactgaggcaggagaatcacttgtacctgggaggtggaggttgcagtgagccgagattatgccactgcactctagcctgggcaacaagagagagactccatctaaaaaaaaaaaaatccagctagcaaataaataaatacataaatccagggggcctatgtcaacagctccatcctcctgacacaaactatacctgcattcgttctctctgggtttgggaatctaggatatgagccaacatatatgcttgtctgaaggggccacttacctcttcatctttctcactgagacttaatttattagccttattctgtacatcttaataaaatctctgctactgtgaggccctactgggggcctttcaacaactctgcccaggcctggggtctcctggggccacagacattaaaaaaacacacagaagcagccaacacaccaccctctggacagcagagaccagtgcaatgcattgctttttctctttgctccaatctccttctgttccttgtctttctctcttcctcttcccatctctcttctctcttcttccctcatcaattccccttccccatcctaagccttgctaatcctccagctccaccaggacacttgcctaacagggtcacaacaccagcccaaagaagcacaaagaaagcaggaaggcctcttaccattacccctgacccacccacctgaccaccttctctgtcccactcaggcctcctgggatggatgtcacccgcttactcctggccaccctgctggtcttcctctgcttcttcactgccaacagccacctgccacctgaggagaagctccgagatgacaggagcctgagaagcaactcctctgtgaacctactggatgtcccttctgtctctattgtgggtaagtcacctagcctctgggctctggcccaggagaggggctgcaggagatcaagcatgcttcccagggtgctaccaggatccaccgccatggtcacggctccttcttgctcgttccaggaaataatcctgggagaataaggtggcccttgactcatttggtttgggaaagctctgcatgccaccagtctaataagcagcttagcatatggtagaggctctgaaaggcctgaagttaagacacttggtgaactttgtttaatttagcatttctgaaacttaatgaatcacagaactcctgtcaacagtaacaaacttcaggaaatgctccagaacatatgcaagtctgggatggaccagtcctgtcatgtcagggttgggaatgaaggctcaggggaaaatatgaggggcactggagcctggcattggagatctggtttgacttcacctgataataatcatagacatactgtgtggtaggcactgtgaggtgagtatggtctttattcatatttcacagttgaggaacttgaggcttaggagaattaagtaactagcacggatcacacagtttttaactggcaaagccagaattcaaaatcaggtacttaactccagaacctaagctcaaaactaatatctcttactacctcggcttttgctaggaaacgaggatatttgaggctgggtgaggtggctcacacctgtaatcccagcactttgggaagctggaggcatgaggattgtttgagcctaggagttcaagaccagactgagcgacatagggagaccccgtctctacagaaaaatttaaaaactagcaaggcacgtggcatgcacctgtaatcccagcactttcgtaggctgaggcgggcagatctcttgagctcaggtgttcaagaccagcctggtcaacagggtgaaaccccgtccctattaaaaatacaaaaattaaccaggcatggtagcatgcgcctgtagtcctagctacttgggaggctgaggcaggaggatcacttgagcccaggagtttgagcctacaatgagccatgattgtgccactgcactccagcctgagtgacagagtgagatcctgtctcaaaaacaaacaaacaaaaactagccgggaatggtggtgcatgcctatggttccagctatttgggaggctgaggcaggaggattgcttgagcccaggaggtcgacgctgcagtgagctatgatcacaccattgcactccagcctgggtgacagacagaccctgactcaaaaaagaaattttttaataaataaataatcggccaggcgcggtggctcacacctctaatcccagcgctttgggaggccaaggtgggcagatcacctgaggtcaagagtttgagaccagcctggccaacatggcaaaaccccatctctactaaaaatacaaaaattagccaggtgtggtggtacatgcctgtaatcccagctacttgggaggctgagacaggaaaatcacttgaacccaggaggcagaagtcacagtgagccgagatcgcaccactgtactccagcctgggcaacagagtgagactctgtctcaaaagaaaaaaaaaagaagaagaagaaagaaagaggatattctacacatatcagacagggaagggaggaacatcaacatttattgatcttcagtgtaacagacttttcactttataaacagacttcatttatcctcaagacaatactgcaaggcagatattatggaaccttttttgcagatgaaaaaactgagtctcatggaggataagtaagttacccacagccacatagtcattatattggcagagtcaggattcaaatcaggtcctcctggctccagagctctcaggaatggaaaataggaaacacaggtgcatctgtgtacaagacaggagtccattttctgggtatcacaatgttcctgtgcctgccacaatggagatgaaggaaggggcacctggggtggctctgagtggcccaagctcacttaggtcgagggaccaggccccacaagagtgtcacaggcagatcccagtgcctgcttggatttcccatttgccttccctcagaggacacgttgctatcagtgcctggctccaggtcagtagccgggctaacaagaacctactggcttgagtcctacagtgtgactcatccagcacgcttcttctcctctccctgaccttgtgacttcccaagccccctctgcccctctcacttcactgcagctcaacgtccccagaaacatctgactttgctccttttgtctctctttgaagcgctgaacaagaaatccaaacagatcggcagaaaagcagcagaaaagaaaagatcttctaaggtaagggcagggaagttctgggagttctcattgttggggtgagactggacttaaagaaggaggacccccaacctctggctaggaactaaatgaaagatttttcaggcctatattaacaaaagaaactgaaagctactaaagacttcctggcttgagctctgagccagacacccacagaagcccagggagctgaagtccactgagcaaaataggttacgaaaagcagcttcctctactagttagcccctgcctgaaatttcaccatcactcatacttttggatgaatgtggtgtttcccaaacctcagtcatttcagaaccacatttataactttgccatatctgagttccacctatttatttaacatatttgtttaaaattaaatcttaggccggatgcggtggctcacgcctataatcccagcactttgggaggccaaggtgggtgaatcacctgaggtcaggagttcgagactagcctggccaacatggtgaaaccccgtctctactaaaaatacaaaaattagccaggcgtggtggtgggcgcctgtaatcccagctacttgggaggctgaggcaggagaattgcttgtacccgggaggtggaggttgcagtgagcttgagccattgcactccagcctggtgacaagagtgaaactctgtctcaaaacaacaacaacaaaaaattaaaacttaaaaaatgcagttgactcttgaacacatgtgtttgaactcatgggtccacttatacattggttattttatgtctttttttttttttctttttttttgagatggagttttcgctctcgttgcccaggccagagttcggtggcgtgatcttggctcactgcaaccttcacctggcgagttcaagcgattctcatgcctcagcctcccgagtagctggaattacaggcacatgccaccatgcccagctaatgtttttgtatttttagtagagatggggtttcgccaagtttgtcaggctggtctcgaactcctgacctcaggtgatccacctgcctcagcctaccaaagtgctgggattacaggggtgagccaccttgcccagctgactttttaaattggaaaatatttttgaagattgacaattagaaaaaacaggtgaatcttgttacctagaaatatttaaaaaatgaaaaaaaagtatgtcattaatgcataaaatatatgtagatactagtctattttatcacttgctatcatacaatatacataaatctattataaaaaattaaaatttcccaaaacatatgtacacacagacagtacataccattcaaaatagaaagaaaataaccaaatgtaaagatgtagtactaaatcataactgtgtaaacaactgcagtacatactgtactaccatcataattgtgaagatacctcctgttgccattgcggcatgctcaggtgttgcgagtacgtgcttacaacgctctgtgagctaatcatctctgcacaaggagtctcaccaggaaatcacatattgcagtaaaatgtgatccctcaaggttctcgtgtatttttcaatgtgtttaatgcaatattgtaaaccttgagtagtaccaagggacccatactaggtgctactagtgattctggaagtgttcccaagaagcaaagaagagtcatgacattacaagaaaaagttgcttgaattacttgattgatactataggttgaggtctgaagctttggttgcttactatttcagacagacaatacatcttgtaaacagatgaagtaaacttacggtatcaataaatacagtacagtactgtaaatgtattttcacttccttatattttcttataatcgatctctacttatccaataattttcttaatattttattttccctagtttacttcatttttttttttttttttttttttagaaatggggtgtcactctgtcactcaggctggagtgcagtggcaccatctcggctcattgcagcctcaacctcccaggctcaagtgatcctcctgcctcagccccacaagcagctaggactacgggtgtgcaccaccatgcctggcagatttttgtattttcagtagagatgaggttttgcggtgttgcccgggctggtctcaaactcctgagttcaggcaatccgctgcttctgtctcctaaactgctgggattacctgcattagccaccatgcccagccagtttacttgattataagagtacagtatataatacatataacataaaaagatgttaatccacagtttatgttatcagtaaggcttccttctggccaacagtaggctattagtagttaagtttttgaggagtcaaaaataatatgagggccaggcacggtggctcacacctataatcccagcactttgggaggttgaggttggcagatcacttgagtccaggaattcaagaccagcctgagcaacatgatgaaacctcatctctacaaaaaatttaaaaaattaactgggtgtggtggtgtgctcctgtagtcccagatactcaggaggctgaagtaggagaatcgcttgagcctgggatatcgaggctacagtgacttgtgatcataccactgcactccagcctgggcaacagaataagaccctgtctcaaagaaaaaaaggatttttgactgtgtgtaaagagtttgtgcccctaacccctgcattgttcaagggtcaactgtatataattatgatagaaaactagtatcacttaccataaatagaaggtaactataaaaataagtaaagttggccgggcacagtggctcacacctgtaatcccagcactttgggaggccaaggagggtggatcaccttaggtcaggaatttaagaccagtctgaccaacatggtgaaaccccatctctactaaaaatacaaaaattagctgggtatggtgctgcacgcctgtaatcccagctactcaggagactgaggcaggagaatcacttgaacctggaaggcagaggttgcagtgagccaagatcacaccactgcaccctagcctgggcgacagagcaagactgtctcaaaaaaaaacaaaagcggagggggggaagttaaaacattgttagtaaattctgggtgaatggatggtattgcctaccaaaggctctaaatttgaggcctaaatctctgtgttaaaaggcataatggccaggcacggtggctcacgcctataatcccagcactttgggaggctgaggtgggtggaccacaaggtcaggagatcaagaccatcctggctaacacggagaaaccccgtctctactaaaaatacaaaaattagccggaggtggtggcgggcgcctgtagtcccagctacttgggaggctgaggcaggagaatggcgtgaacccgggaggcagagtacagtgagccgagaccgtgccactacactccagcctgggtgacagagcgagactccgtctcaaaaataatataaaataaaacaaaaaataaaaggcagattaggccaggcacggtggctcataactgtaatcccagcacttcaggaggctgaggcaggcagatcacctgaggttaagagttagagaccagcctagccaacatggtgaaaccccgtctctactaaaaatacaaaaattagctgggcgtggtggtgcacgcctgtaatcccagctacctgggagactgaggcaggagaatcactggaacccgggagatgaaggttgcagtgagccgagatggcaccactacactccagcctgggtgacacagcaagactccatctcaaaaacaaacaaacaaacaaacaaaaaaggcagattataaagtgttagaaaggcactaaggacacgttagcaccaaactgaccctttcaagttgaaaaagattgaaaaaagaatccttttttattgtataattcaggatcatttaacattcacgtaccacctaaaatcataccaccattaacacaggttcccactttgggaaatactggactgaggcattgctgaaatgcacaccttattcctgtcttagtgtgcctcagtttatcatatcaactgtaaccaaagcaaggagcactggattaggtattaggaggtaggatctggcactgtgtgatcttgaaagtccctgctcttttctaggcctattttgttggctgtaaagtgaacaagcaagatgagattattgacagataaaaatatataactgacaaatatatttatatgctaagcactgggaacatagcagtgaataagaaagatatatcttatccttggtctcatggagtttacattcttgtggagaaaacaggtgaacagcaagtaaatcaataaataggtaaataaattcagatgttaaagagtgcaaagaaattacagcacggtaatgagactgaagggaagagtggtctgggaaggcctctgtaaggaagtagcatttaaatagagtgaaaaactcagtaacctagagcagcagcgtccaatagaaatacaatgtgaggccaggcgcggtggctcacatctgtaatctcagcactttgggagggcgacaagagtgaaactggctctcaaaaaaaaaaaaaaaaaaaaaaaagaactgtgatgtgagctacataattttaaatttgcttatggccactttatttatttattttttttgagacagagttttgctcttgttgcccaggctggagtgcaatggcgcaatctccactcacagcaacctccacctccccggttcaaacaattctcctgcctcagcctcccgggagtagctgggattacagatgtgccaccatgctgggctaatttttgtatttttagtagagacgggtttctccatgtcggtcgggctggtcccaaactcccgacctcaggtgatccgcctgcctaggcctcccaaagtgctgggattacaggcatgagccaccacacccagttgataaccatatttaaaaaaaaaaaaggtgcaattaattgtaatattttatttaacctagtgtattcaaaatgttaacatttcaatatgtgattaatttaaaaagttattgaaataatttatttttgttgtgctaaatctttgaaatctggtgcatagtttacagcacatctcattccaatgctcagttttgacaagcataaaatgtagttctaactaaaaagttgtgtttaagaggaagaatatttttatattgcttcagttttacattttaaatttaaattaattaaaattaaatttgaaaattcagtttctaggttgcactagacacatttcacgtactcagtagccacagatgaccagtggctacctgtatcgaaggtacaaaaaccagtggctatttccttcccaggaaaagaagcagcaagctgtggcagcagtgtccaagacagctcctgctgggttcctgcagcaggaactcacctgctgcgttcggtgcacagcggggcagcgaagttaacaggggtcggagaggcaagcaagggccaaatctcaaaggccaaaagaaagttcatgtttcattttaagttcaaagagaaaccacttaggccgggcgcggtggctcacgcctgtaatgtaaacccagcactttgggaggccgaggcaggcagatcactttagctcaagagtttgagaccaacctggacaataagtgagaccccgtctataaaaacatagaaaataaaataaaaataaatttagccaagcgtggtggtgcgcacatgtggtcccagctacttgggaggttgaagtggcagaatcgcctgagcccgagatcgagattgcagtgagccgagatcgcgccactgcagtccagcctggctgacagagtgaaaccctgtctaaaaaaaaaacaaaaaacaaacaaacaaaaaaaacacaaactagggagaagacgaccagggccaggcaagagccaggtaagtctggatggggatggaggtgagggaatctgactgggggagcgggcggtgggcggtgggcaagccagcggggaaacctctggtccgggatctccctagcccgaggagctcccaggcagaggtgaggaccggaggggtgggcgtggccggctcataaagccccggcgtttcccacgcagaaggaggcttcgatgaagaaagtggtgcggccccggacccccctatctgcgccctgcgtggccacccgcaacagctgcaagccgccggcacccgcctgctgcgacccgtgcgcctcctgccagtgccgcttcttccgcagcgcctgctcctgccgcgtgctcagcctcaactgctgagcgcccccactcccggccgcgagcaggcagggcttcggggacgcggggcgcttctcgggcgggtgatccctaacagggcggcttcccagggctgcaggcgggcggaggttccaggagatgggacttcagggagacctggcttgggctaaaatcgaaatacaatatatataggctgctcgaaggtgtgcggctgtttctgtaaaggtcccgaaagttctcggtcccttcgccacggagtcccgcgctgctctcccggggctcaggaaacccgggcgtcccagcctcacagctgcactcccagtcaccgctgctgccgacctgggggttaggaacgaggctatcccctgcctttaaacctgggaacacccgaggctgcctccaaaaccaggaaattcagaccagccaggaagaaaggaacagcctttcagtctcacacatttcctcctaggtgctcccctctccccaggggaaaaaaaaaacggaaagaaagaaagaggccaagcgcggtggctcacgcctgtaatcccagcactttgggaggccgaggcgggcggatctcctgaggtctggagatcgagaccatcctgaccaatatggagaaaccccgtctctacaaaaaatataaaattatttgggtgtggtggcgcatgcggtaaatctcagctacttgggaggctgaggcaggagaatcgcttgaacccgggaggcggaggttgcagtgagctgagatcacgccgttgcactccagcctgggcaacaagagcgagaaactctgtcttaaaaaaaaaaaaaaaaaaaaaaaaaaaaaaaaacaagaaaaaagaaagaaatccgaggctggacgatcacttgaggccagaagttcaagaccagcctgggctacatagtgagagactccccgccaccccaccggtctgtacaaaaagttttaaaaattagccgggtgtggtggcatgcaccggtagtcccagctactcaggcagctaagtcaggagaatcacttgagccctggagttggaggctgcagtgagctatgatcacaccactgcactccaggcttggccacagagtgaaactctggttaaaaaaaaaaaaaaggaaataatcattcctgttcttgttataaatccaaggtagtgtcctgttccctctctgttccttaacacaagaaacaaacacacacacccccacacaggaaagctgccagatgcttgttttgttttctgttatttaggttgcagtcctacagggcaagaaccttttgttccttgtaccacagttgctgctgagtaaatgtcatattgggaagataccgcagtcactcctcgtgttttccagacactgttcaccaagcaggcaccatttggcccccaggggtgaggccaggatgcaaagctaaagactcagtcgattagtaacaaagccacttggctgctgggtccagacaaccacatggaagaccaacccattcattcattcattcagcaaatgtgtattgagcacctagtgtgtgccaggtgctgtggacatagtggtgaagaagtccaatatggatcctctccttacagagcttatgggccagtgacccatggccattgtctcttgttagaggttagaaccgttgttagcatatgtggtctattccctcagactatcagttttggtttttctttagagatggggtcttgctatgttgctcaagctggtctcaaactcctggcctcaagcaatcctcctgcctcaacctcccaaagtgctgagattacagacatgagccactgggcccagccagttcttgcttttgtttgtttgtttgtttgttttgagaaagagtctcactctgtcactcaggtgggagtgcagtggtgcaatcttgcctcactggagcctccaactcccaggctcaagctatcccccaacctcagcctcccaagtagctaatttttgtatttttagtagagacagggtttcgccatgatggccaggctggtctcaaactcctggcttcaagtgaaccacccgcctcagcctcccaaagtgctgggattacaggtatgagccaccacgccccacctccttctccttttcagaattcctcctcaagcctaaagtgctaagagcatggtcctgggcctctcaaaactctgctggtctaatgaccagaactgaaactcacatttgtgactcagagttatggtttgattgttgtgagaatctgggaccgccgtctccaacaccattattcattctatttctgtctcacacacatagggtgaacttgacctaggaagatttgccctacctttgtggccactgattgattcaggatcatttcttcctgaagggcatagccttaaacttgtgcccaaagttctcatagtgtggcgttgaacaagccttttttttttttttttttgagacggagtcttgctctgtcacccaggctgtagtgtagtggcgcaatatgggttcaccacagcctctgcctcccaggttcaagtgattctcctgcctcagcctcccgagtagctgggattacaggcatgcgccaacacaccagctaatttttgtatttttagtagagacagggtttcaccatgttggccaggctggtctcaaaatcctgacctcaaactatctgcccacctcagcctcccaaagttctgggattacaggctatgagccaccacacccagcctgaacaagtcacttttgatgctaccatttccacgtttacaaagtgagaagtaaatcagtcagagtattttaggtgcaaacaacagaaagaactctagctagcttgagagaaaaaaaggtagagggttagtctcctggggagacttggggacctcaaaggaaagattatacaacgtgcctccaaaaaaaaaaaaatagcccctgaggggtgctagaggagccaagcggacaatgtcttccaagcaaagccacaggaatgtcagctccaacctcttcagtccttgcactggaccattcaaagtaattcccaggagaggctgattcacctgatgtggggccaagaaagggtggtccaccttgactgacagtcccattgttcaggaaaaaattctcaaaccatgtttccctctgctttcacaccaccacaacagtcatcaacacacaacagacttgtgtgaccccaaaatgagaggggatttccccccaccagcaggcaaacaatcagttctgcagtggacaccagctaggtgtcctccaattcaattccaacactatctacttggagatggcatcagatcccacagtctgagggctcagtccccaagactgccctcacttcagacaccagtcaaaagtggagcctctagaacttttgacaactggctttaagttggggtttccacaaccctctttgggctcaattaatttgttggagaggctcacagaacacagggaagcaaggccaggtgcagtagctcacacctgtaatcccagcactttgggaagccaaggtgggaggatcgtttaagtccaggagttcaagaccagcttggtcaacagagtgagaccccatctctataaataataaaattagccaggcatggtggcacaagcctctagtcccagctactcaagaggctgaggcaggaggatcgcttgagcccaggaggtcgaggctgcagtgattcatgatcacaccactgcattccaggctgtgtctcaaaaattaaaaaaccaaaaagaattcagggaaacacaccagtttattataaaggctattacaaaggctgcagatgaagagatgcatagggtgaggtatgggaaggggtgcagagcttctgcgtcctccctgggcctgccaccttctaggaaccccagcatgtctggctatcaggaagctctctgaagcctgtcctcttgggtttttatggaggcttcattatgtaggcatgattgattaaaccattggccattggtgatcaacttgaccttcagtccctctctcctccccagaggttgggggatggggctgaaagtcccaaccccattaaatcacgcatttgcccttgtggtgaccctttttttttttttttggaggcacattgtataatctttcctttgaggtccccaaatctctccaggagactaaccctctaccttttttttctctcaggctagctagagttgtttctgttgtttgcaactaatatactctgactgatttacttttcactttgtaaacatggaaatggtagcatcaaaagtgacttgttcaggctgggtgtggtggctcattgcctgtaatcccagaacggtgatcaaatgatccacccacctcgacttcccagagtgctgggataacaggcgtgagccgctgcagccagcccctccatctttttgagcaaccacagatctaacatcaccagccattgttgagaaattaccccagtcatacagtaggaactttagaaagaaatttaactccaagggccaattcccatttgcgaagaggacaggataggcaagaaaagaatttaatttgaactgaattagccaaaccatctgtagtcaatttaagatgagtctagagtagacgagttaccctttcttcttccatgtaccaggagtagaaggtgtgtatgttgggagcgggtattgggttcaggaaggaggaaaaggaatgacttttgtttaattggtaaaatcctttaaaactgtcaaatgctttcatgttcattacagaaaggaggtttctattaattgattgcctgcagagaaatagaagctctcccagctggatatacgagttgtagagtctgggaggtggcaccttctaatggtgagaatgatgatattgacaattattatgccttctttttgcctggggagcccagcaaatagcttcattggagtccagaggctttcacactttccagagctcctctttagaattcgtggactctatggctgtatagactaccagagcaatagtaaatattgggctgctgctcactgctcgaggcctgtgtggtctgcagttatcatagtgccatactaacagtgattatttattgagcagctacttcatgccaggcatgacaccaagactatcaaattaacgtcttgacctaagtatcactgtaaataagagaactggggctcaaagatgttaagcaatgtgtctagatagacctcacacctcagcatggggattcagatccagcccatgtcattccagagcctaggcccttaaacaccaggccactgaaaaccaggcagaggggactctgcctgcgtagagccaacaccttgcaagagactcggcccaagaggtgtacccaacagactccccatgtgactccccagctctctaatgagaccttgtcaacaccaccccagggagtagtctcactagtggagcttctggagagaagcagctgcatcttcttttcttgggtcagtacttactcaagaggccatgagaggtacaggatagggcactgataaagaatcaagaggggctggggtatggtggctcactcctgtaattccagcactttgggaggccgaggcaggaggattgcttgagcccaggagtttgagaccagcctgggcaacatggcgagcccccatctctacaaaaaaaaattttaaattaaattagccaggtgtggtggcacgcgcctgtagtctgagctatttgggaggctgaggcaggaggatcgcttgagctcgggagttcaaggctgcagtgagccatgaatgtgactatactccagcctggatgacaaaatgagactttgtctctttaaaagagtcaggtggtacaaattcctgttccagcactgcccctcactgctgtatgaccttgggcaaaattccctcccagctgcaccatgaagggattggacaaggcagtcttgggggcgaatccagtccccttcatggtgcagctgggaggggacctggcccaagttctctattttctttttttttttttttttttgagatggagtctcgctctgtcacccaggctggagtgcagtggcttgatctccgctcactgcaacctccgcctcacgggttcaagcgattctcctacctcaccctcccaagtagctgggattacaggtgtgctccaccatgccaggctaattttgtatttttagtagagacggggtttcaccacgttggccaggctggtctcgaactcctgacctcaggtgatctgcctgcctcggcctcccaaagtgctgggattacaggcatgagtcaccacacccggccctctgttttcttttctctgttgtttttctataacctggtgtcttcaatgtcttctccactacagcgagactcagaattgtcagacagcaacctattgagatgggtttagggaaagaaggtaactttctggggggttcatttcactaaaaaggggctagatccagttagtgtaaaacatgtctagattcagctactcaaatattctctggaatgtgtcactctctctcaattgtgttggctttatatctttcttttttttttttttgagatgagcccttgctctgtcccccagactggagtgcagtgtgtgatctcaactcactctaactgccacctcccagttcaagtgattttcctgtctcagcctcctgagtagctgggattacaggcgtgcatcaccatgcccggctaatttttttttttattctattttttttttagtagagctagggtttcattatgttggccaggctggtctcaaactcctgacctcaggtgatctgcccaccttggcctcccaaagtgctgggattacaggtgtgagctgctgcacccggtctgtgttggcttcatcctaaggcaagctggccttcgtgggggcaaaggagcagctacaggctcacattccttccaatcctggcagccccactgaagacagtaccttttctgtttttaggatagctgggtctcttttacagttgccacctccacctactgtgcaacaggcacagaggcaaattctacacttggtgtgcaccagcagcattgggaaacactggggacgttgttaaaatgcacactataaggcctcaccccagacctacagaatcaggactggggataagccctccaggtgtttctgaggtttgctcaagtctaagaaccacactgggttatggaacaggctttaggggaataaatacaagccagcagttagtaggaaaagcaggtgcaggtccccacgagagacaggttgaggaggggcattcagtacacagtgtgggtggatactctagggaggcacccacctctctatttctctccctggtaatagggcaagtatgacaacactgagcagggttgatcagactattacgatgctaagcagtgtgaatttaggttccaataacttatggaagttgtcaggaaaagcccaccacccagcacccgggggtctttagaacccttgcaaggttgtaactcctcccaccagggagaagcagcctctagtcctgggggagtctgagtccaagcagcccacagagtgaatcctggagtcgctcctgcaccacaccagatttctagcaaaagtcctaaagtcccgggattgagtccagaccaacttgagccacatgcctgtcttggagccagtttggagaagcaaccaacctggaactgatcgaagcccgcccggaccactgcacacccctggctgcctctaccacctcaagcaggtttcctagctcggtcccctgggctagtcctgagtaggtctcagggatgagaatccggattcctggggtttcctggaacctcagactcccaaagcagggctgtcccaacagcagcttcctggagtcctcactggcatcaacagtccccgtgatccggcttcctggagtcctcactggcatcaacagtccctgtggatccttcctgggttttagtccatgctacttccagaccctctaagctcattatttctggactgaaaagggatcccagcacctctagcctaggaggcccctcccaccacagccagtcacacagaggtgggcatggggcttggtgtgcagaaagagccctgacatggactcgggtgggacacccagacctgcagagtgacccggataagtcacaacttctctgggcctccgtttctccacatacaaatgctgggttctgctccacaggactctaaggttctcccttagttccaagatcctatgacttctctaattttctaatttcctaagtatcctaaattccctgctctcaaaacagctccctcccaccacctggtgtctcatacagcccttaaaactcagcataaaggccgggcacagtggctcatgcctgtaatcccagcactttgggaggccaaagcaggcagatcacgaggtcaggagatcgaaaccacggtgaaaccccatctctactaaaaatataaaaaattagccggacacggtggcgggcgcctgtagtcccagctactcgggaggctgaggcaggagaatggcgtgaacctgggaggcggagcttgcagtgagccgagatcgcgccactgcactccagcctgggcgacagagcaagactccatctcaaaaaaaaaaaaaaaaaaaaaaaaactcagcataaaaactcctcactaatgttctatcattcgagcgtcaagacagccatctgaagtaggtatttctgtccctgcggggaacacagtgagtcagcagcagacccagggctcctctttccaaagttcagtccactgctccataaacagccactttccaccaaccacaggcctcatcttcccatctctttcctggaaaaaatccaaccagggctaggcctggatactgcaggacccttggccaattccttctttctccatgaagctttgatgggggcagcccagatatcaggagtggagtattggggtattgggggtggagcaggagacacatcatctttcattgtgggtacccggtcagtgtcacacatgtgacagattagcagacctgaaatcagaggtaagtctgagaccagatgtgaaaagaggggctgtgttttctgaaacaaaaggttctgggaactgacaggacacctccgaacaggaaaggaagaggctggcataacagaaaccagaactcctggaagaagggaggtggggggctacatgggatctggcaggaggaagcattctgacagcatttcccacatccaggaggagacacgctagagggaagggagcatgcgcacacacaggcagcggctgtgcagcagaaggcgttcaacctctctggcttagaagaacagcagcctctccttttttctactgtgaagttatcgtcccagcagccaccccagtagaagaactgaggcagggctctgggtagccctctggtttacagttccagagttcctgatctaatgttgggaaatctgaatccaggctcccttcctaaacctgaccttgctggtgtggaaggggcttggattttggtctaagtcctaccacatacaaaagtcagctcatgcttatggctcctctcagagcctcagacaggggaattcaagtctctatgaggaataaataagaccatacctttttacatatgatgtaaagatacatcatatctttagaacttaatgtgagtccccacttagtgcactaaggccaggcatggtggctcatgcctgtaatcccagcactttgggaagctgaggtgggcagatcacctgaggttaggagttcaagaccagcctggccaacatggtgaaaccctgtctctactacaaatacaaaaattagccaggtgtggtgatgagcatctgtaatcccagctacttgggaggctgaggcaggagaattgcttgaactcaggaggcagaggttgcagtgagctgagattgtgccactgcactctagcctgggcgacgagagtgagactccgtctcaaaaaaaaaaaaaaaaaaaaaaaggccaggcacggtggctcacgcttctaatcccagcactttgggtggccgaggcgggtggatcacgaggtcaggagatcgagaccatcctggctaacatggtgaaaccccatctctactaaaaaaaaatacaaaaaaaaatttgccgggcgtggtggcgggtgcctgtagtcccagctactcgggaggctgaggcagaagaatggcatgaacctgggaggtggagcttgcagtgagctgagatagcaccactgcactctgctgcctgggcaacagagcgagactgtctagaaaaaaaaaaaaaacaacaactctaaaagatgcttgcaccatgcctgtcacccaagtgtgcaagatctcagcctgttttgaccacttgtgttgtggtcagttgggagtgggtgccctgtcatttggtactaataatagttgaagtaccaaagtctgtacactatttacagcagagtcacatcacatacacacgtaacttatgcaacttaaactatgtgcactcagggaaaaagaaaaggtaagaattaattgtcaggcaggacacactgatgagcatctaagccagagtgagcagttttcagcccctcatgcctcactgatcatgggccattgagtgtgacttaagggttttacttgacattgtatctttagaacttaatgtgagtccccacttagtgcacttttaaaaatactgcaaacagccgggcacagtggctcacgcctataatcccaggcagatcacttgaggtcaggagttcaagatcagcctggctaacatggtaaaaccccgtctctactaaaaataccaaaaaaaaattagctgggtgtgatctcaactactcaggaggctgaggcaggaggatcgcttgaacccaggaggcgaaggttgcattgagctgagattgcatcactgcactccagcctgggtgacggagcgagactctgtctcaaaaaaaaacgaaagagttccctcttcactttacccattctttcaagcctaaggaccacagacagccgttccactgcagagtaccccgtgaatgcttcatcagcacgactataaccccctattcatggcatacattgttggcagaggattatctataaaataaaggctcaaaattcttccaggcaccaagatttttatttacccaccttcctgctttcttttaacattataggccaaattattctctttttgacccagggttgtgaaaggaaccatctggttataaagtggtggcagatttcacgaaatctgcctgcattcatgtttttctggcccctctcaacccctagctgtcacttctctgttctttctcagttgccccttaacagtctattctaacccctgtaaaacagggactaaaagtactaacctcattgtaatgaggtttaagagaaggcccagcactaagccaggctctcaggaaaattcaaacaacagttcctctttgcccttcaatatagccccttctcatctgtcatgggctgaagaaccactggacctgtaaaccaagcacacaggtataagtccacagaccaggtgaaggcctagatggcaaaacacatgggctttgtgactccactactgacttccaggctaaggaaggactgacttagtgagctgttccaagaccactgagctcatggttccctgtggctgggacctccatcatgaccggggcttgaagagggtactctgttcccgctgccacatttggaacagtatgacggctgcagcagaggccaaaaactaagtgatcagccccagagagtcgatgggggacactgacaaaccaatcacaaagttggtgccattagctcttagggaggagaggtggggcctgggcaaggacagcagctggagggtgaaacgcagacctggctctcagtagcggtagtgatccggcttgaaggggccatcacaggacatgcccaggtactgggcttgcttctcagttagcttggtcaacttcacattcagcttgcccaggtgggcttcagccactgcctcatccagctggggagaaacaaaggaagaccgggaatcagtgccattttctgggacccctacacgcgtctggctgccaatagaggcagaagtgttctgttagggtttctgccatgtgtggtactcatgttaactctttctatcctcacacccagcctcagttaatgtgttgttttggctgcccagcccccctcaaaagggaaccatgccacaccctcccctacatgtggcttgacaggaccatcaatcacatctccttcctcattcttcaactcaagcagctaaccaaaatgcttctctggaattgatctatgcacaggacatattttccatgacaggcagagacaaggtgctccaaccccactgggattcctaaacagggaagggtatctatcaatctcagctcaccagttccaagtctattttacaagtgaaatgaagatagatccgagagacagaaggacagagccatgatgacacggaatcctaggtttccagtgtttggatccgagaataaagttcttttttttgtgacagagtctcattcggacgcccacgctggagtgcagtggcacgatctcggctcactgcaacttctacatcccaggttcaagtgattctcctgcctcagcctcccgaggagctgggattacaggcgtgcaccaccacgtccagctaactttctgtttttagtagagatggggtttcaccatgttggtaaggctgttcttgaactcctgacctcaggtgtcgaactcctgacctcaggtgatctgcctgcctcagcctcccaaagtgctgggattacaggcgtgagccaccgtgcctggcagattcgagaataaagttcttttttggattaaactggttgctttttttgattaaaatgtatctataaattctttgatactcctttaagaattagagcctaatccccaccgcctccccccaccccaccgagtgattcctttctaatgaatagaagaaagcagaagtgatggtgtgtgactttggacacaagttcatagagaccctgtggcttcctccttgctctcctctggatgacttactctgggggaagccagatgccatctcctgaggatgcataagcagccctctggagaggcccatgcatgaggaattgagacctcctgtcaacagcgatgtgaagaggatcttccagacccagtcaaaccttcagatgattgcagccctggcagaaatcttgaccgcaacctcatgaaagagcctgagtcagaagcagccagctaagctgatctcaaattcttgacccacagaaactgaaataataaatatttattatttgaagccagtaagtctgggggttagattgttatgcagcaagataactgatacactggtttgaatagtgtttctatcacttgtgaccaaaaggattctaatccactgccatcctccttttataaaatgaggaaatcaaggttcagaaacgtgaaatgacgtgtccacggtcaccaagctagtgaatgacagagctaggatttgaacccaggtctatctggcttcaaagccccaaaatgtgtctcaagcatcccagcttatggcctctagagcagctttgaagagattatgcagaaaccgaggaggacagaggcaagagttaaatacaagcaagcctctaactctctcatgaggtaggcctctccctacccctaagggaccccatcctgtcccatgatggcatggcggcctctgaccacagctcagcccacagcttttacattcccaagtggtttcacatctactgtttcattagagcctcccaaacacccttaagaagtaggatgggtgcggtttatccttgtatcttcagatgaagcaaagagcctgcagaaggtgatgtgctcagcagagaggcgggcaacagtaggaccagggcccagcctagaactgagtccacgtcagttccagaggtagaacgatggcctccaacccccacagtacacattgaaatcaaccttctgcttggcccggactagcccagaacttttccttctcccagcaccctgaaccagaaggtgtgtgtcacgtcctaaggtcaacaccttggacagacagagctaggttctattcctggcctgatacttaacatctgtgagagcaagtcggtctctacacctgactttccccattcgcaggatggatggatcactcatctctcaaggctgttacaaagatcagtgctactcagagtcattcgtgcagtaggtgacttaataaatggtggctgccttctctgtcattgttgaccaaggtacctagtcccttgcctgcatacagcatgtgaggcatgatgccaagagtgtcctgtccccaagccacatgttagcaatgatgaagaaaagtggtaaggacagggtcaggtgctgaggcgggagctttgcctctttcacttccaaccctgccctcatttcaaaggcctgaccaatttctcaccaaactcatagccatatttctcccaactgggattagatggggatcaagtgagaatctttcaaccccacaaccagctgcacagaacaaggtatgccttgaggtccttatgagtaaaatgtttggtccagcaagacattgctccagggagattagttgttggctggccctggaggcagatgccccaggcctcttcctgcgtcttcctcaattggtagaaccagcctttcaaaagatgaagggatggtatgtagaccccatcacagcttctccagcagcaaaaggctggaagagcaagagctactcttaccatttagctcataaggagactgaggattggacagggtaagggacaaagcaaagttcacctgtaaaactgccaagaaaagccaggactaaaacatctgtcctgaccccagggaagggtggactgcatggggtgttagggtgagcactggatttcatgtcagaggacttcatcttcatgagtatgcagaccatacaaccatagtgagatgccatgcttagggatgtatcttttttttttgagacagggtctcactctgtcaccaggctggagtgcagtggcacaatctcgtctcactgcaacctccacctcctgggttcaagcaattctcctgcctcagcttcccaagtacctgggactacaggcatgcgccaccatgcccagctcatttttttgtatttttagtagagatggggtttcaccatgttggccaggctggtctccaacttctgacctcaaatgatctgcccacctcggcctcccaaagtgctgggattacaggtgtgagccaccgcgcctggccagggatgtatcatcttattacaaggccacaacgtgcagcctgcagactgcactcagcttatacacatgtccaagttaacccacccagttattttttaaattataatgaggccaggtgcagtggccgaggcgggtggatcacttgaaatcaggagttcgagaccagtctggccaatatggcaaaaccccgtctctactaaaaatacaaaaaaattagccaagtgtggtggcatctgcctgtaatcctagctactcaagaggctgaggtgggaggattgcttgaacccggcaggtggaggttgcagtaagccgagatcacgtcactgcactctagcctgggcaacagagtgagactctatctcaaaaaaatcaaaatcaaaataaaattttaatgagttgcctgtatttgaaaatcattttgtatagagatcttggtatctctggctctcctgaaaggttagaagccctggtcagacggacctgggttcctaggtggcaaccagccctttaccccttcagctcttccagtccttgttcagctggcatcactcatttacctgcctagcccctgtgggtgtgtgggttcatgatctcaggaaatcctcacaatcctgaagggggttgctattaccttcatttcacagatgagaaaatgaagacagagaaagaatttgcctggattacacagcctgtaagtggtggggctgagattcaaactggggtgtgtcccgctccaaggcccaggctctcctcaccacctggtcctgccgctctgctgtgctccagggagccactccctactgtgggtctcagtttcttcttctgtcaatggggagaatgacttctgcactgtagaggaccccatgagggcctctaagagggcagacaggcaagcactttataaactctggcaagccctgtgtggggatcccaggattagacacgtgacccttggcttgaggtagaagaataaacccaccttcttgggcaggaaatgaaccccaacggggtacttgtctggatgggtccacagctcgatctgcgccatcacctggttggtgaaggagttactcatcacgaagctggggtggcccatggcacaacccaggttgaccagccgaccctcggccagcaggatgatgcggcgcccattcttcaaccgataccggtccacctacacgcaggcagggcaacagtgaaggcaggcagggccccgctcccacagcccaccctctgatctggcaggcctctctgcctccaacagtgcccatgaggagtccgaactgctccaaaacaacctccagcacatggcttagcacaaaaataacagccaatatttattaagaaatgttgagctggccggggcacggtggctcacgcctgtaatcccagcactttggaaggccgaggcaggcggatcatgaggtcaggagatcgagattatcttggccaacacagtgaaagcccgtctctactaaaaaaaaaatacaaaaaattagccgggcgtggtagcaggcgcctgtggtcccagccactcgggaggctgaggcaggagaatggcgtgaacctgggaggtggagtttgcagcgagccgagatcgcaccactgcactgcagcctgggcgacggagcgagactctgtctcaaaaaacaaaaaacaaaaaaacaacaaagaaatgctgagctgcagactgcacagttctgctgtgagaacttcacgtgctcacacttgcttggcgcatatgaggcactcagtaagcagcagctaatgttatcgttatgatcactgtcatgtgccctgtactaagtcctttacaggtaactaccacatttcatcccagaaacaaccctgtgatttcagtactgctgtcatccccatttcagattcagaaactgaagtttacaagggttaggtcacttgtccagagccacacactaagaggaggctgcaatttgagtctggacggtctgaggacagatcccatgttctcaataaccatgaaatagttttgaatgcagcttagcaaaagctgaatgccgtggcgctcacattggaatcacctcagaagctttaaaaaatgaggatacccaggccagacgcggtggctcatgcctgtaatcccagcactttgggaggccaaggcggggggaatcacctgaggtcgggagttcgggaccagcctgaacaacatggagaaaccctgtctctactaaaaacacaaaattagccaggcatggtagcacatgcctgtaatcccagctactcaggaaggctgagccaggcgaatcgcttgaacctgggaagcggaggttgtggtgagccaagatcgcgccattgcactccagcctgggcaacaagagcgaaactccgtctcaaaaaaaaaaaaaaaaaaaaaaaaagataccttggcctcattcccagagactcctattcctgtggcccacagtgtggctcccaggtgactgccaaggttgagaactcccggtttagtgagtgaacgtgacatggaaatccccagcctcagtgccccagtcctccgtctgtcccagctgtctgaacacacaaacttgctttctccccactcccagctcttcccttgccatccctccaccctcaggcagcctcccaaacatttccccaaaagcccaggtttccaagctgctccagaggcctagtaccgatccaaggaaaggtctctgatgcccatcaggcattgattgatgcttcaatcaataagcactcactgatacccatctaagccccttgcagggacacgtcaacctggactctaccctcctggtacaacagtggggtcagagaccaaagccagtgatggatgctgcactaggggtctgtactaagagtgtgggcattgcctctgccagaggagctggccaggaagggggtctcttttttattttattaattttttttttttttttttttctgagacggagtcttactctgtcatccaggctggagtacagtggtgtgatctcagctcactgcaacctccacctcctgggttcaagcgattctcctgcctcagcctccagagtagctgggactatacgcatgagccaccatgcccagctaattttttgtatttttagtagagacagggtttgaccatgttggccaggctggtctcaaactcctgacctcaagtgatccgcctgcctcggcctcccaaagtgctggaattacaggtgtgtgccaccgtgcctggccagaagggggtctcttgagctgggctgagaagatgaacaaggagaagggcatgtgttctgttccagacaaatgcagctgtctggacagatgagcagaagtaggagctgcagtgggtattcagggagtggtcaattatggcctgagtacagaggcccttgagaggacggacaagagataatgttgggcagaaggttggcaagactgtcaaggatgttgagggtgggcatagagtccagctttggagggcagcttggcagaaaggtgcccatcaccccaatgtagcaggtttcacctgtgatgcctttgcaaaaaggaggtctagacagatggctgtcaggggtgtggctgccacagaagcacgccctggccacccccacactgtgatgagtgccaggccttctaggcagagatggaggtgccctctgcctagccgggaactgacaccctagactagtgcaggacctagccaaggagaactcccacgcaggagcagagcacccaagaggagcagtgtaggggatgtgggttcatagagctgcctgtctgcctctctgggacttgggcttctggtgtggctgtgactgggtgggtgtcagggctttggccaactctgtgtctgtatcttccttatcatatctcaaacacggcacagcaccaactcaaagaacctcacataggtgggcttttctccctttaaaaaatgtggtggacctggtgtggcagctcacgcctataatcccagcactttgggagataacttaagctcaggagtttgagaccagcctggggaacacagcaaggcctcgtctctacaaaaaataaaaagttagccaggtgtagtagtgcacatctgtagtcccaggtacttggaaggctgaggcaggaggatcagctccttcagcccaggaggtcaaggctgcagtgtgccatgatcatgccactgccctctagcttgggtaacagagtgagcccatctcaaaaaaagaaaaaaaaaatgatgaacatctctacatacatatttaattatcctaaggaccaattataggagagattgcccagtcaaagaggttgcttaactttaaagctcttgatatccaaagccaaaatgtcttccagaaacatactacttttataatcagagaaaaaaataaactcataataattgcaactcaagtaaaacttcacaccccctataagaactcatcttccagtttcagtgccccaatgcccaatgcaaacctgttctttcccagctcagtgcatgggcctgctcctcacacagtgattcaagctgtgtccctttttgttttttgtttttagttttgtttttgagatggagtctcgctctgttgcccaggctggagtgcaatggcgcaatctcggctcactgcaacctctgcctaccacgtttaagcgattctcatgcctcagcctcccgagtagctgggattacaggcacccaccaccatgcccagctgatttttttgtttgtttgtttttgagacagagtctcgcactgtcacccaggctggagtgcagtggaacaatctcggctcactacaacctccatctcccgggttcatgtgattctcctgcctcagcctcccaagtagctgggattgcaggtgcacatcaccacacccggctaacttcttgtatttttagtagagacggggtttcactatgttggccagactggtctcaaactcctgacctcgtgatctgcccacctaggcctcccaaagtgctgggattacaggcatgagccactgtacctggccttttttttttttttttttttgagatggagtctcactcttattaaccaggcaggagtgcgagggtgcgatctcggctcactgcaacctccgcctcccagcttcaagcaattctctcctgcctcagcctcccaaatagctgggattacaggtgcccgccaccacacccggctaatttttctatttttagtagagatggggtttcatcatattggtcaggctggtctcgaacccctgacctcatgtgatccgcccgcctcgacctcccaaagtgctgggattacaggcatgagctaccgcacccggcccagctaatttttttgtatttttagtagagacggggtttcaaccatgttggccaggctagtctcgaactcctggcctcaggtgatccgcccatctcggccttccaaagtgctgggattacaggtgtgagccaccatgcccggccaaagctgtgtcctttgttactctgcctccatcctgaccccacatgccgtccatccaccccagcactccctaagctgaggctgccatcatcccctgcagggattctacgagcctcctctaaaagcctctctccccaccacccgccattgttgcttttattctgcacacagtagctagagtgatctttctaaaactacagcctcaccacatacagctcacctgcctgataccttcagggatgccggctgcccacaggataaggttgccacgtctggctggctctgatgctaggccctcttctccccatccccctgcacaggttgccaccatctcctcagctctcctccctggcagccagcactcctctgcactcccatctgcccagcccactggcaaggcgggagcttctcacctgcggcttgatgttcaccttctccacggcgttctcgttgagccacttgacatcgatctccacgtcaaagtgtccaatgttacacacaatggcatcatccttcatctgctcaaagtgcctgtcaggcagcccaagaccgtgggagattgtcagggacagaaagctgtcccaactctgccctcctccctcactccccgggaccccccatctggcacctaccggccaaggatgatgtcaatacagcctgtggtggtgacaaagatgttgccctcctgacaggcctcatccatggtggtcacctcatagcctgtgcagagacagtggctgtgggtcatctacggtggccttgcccctccctctggccccagtggctgacaaccaacccttgccctatcctaccctccatggcagcctgcagtgcgttgatggggtcaatctcggtgatgatgacgcgggctccgaaaccccgcagggcctgggcacagcccttgcccacatcaccatagcctgctaccaccgctaccttgccggcaatcatcacatctgtggcccgcttgatgccatctatgagggactcccggcagccatagaggttgtcaaacttgctctgaaaggaaagggggtaaggagacaataggggcaggcaaggccctggggccaggacaacttggcctcagagtattctgaagagcccaggcatcatgggcccaccaagcatcccggcctgggctgaacccctccagcacccaatgcccccacaagcccttcaccccgatcggctcaaagagcttctctctaatctttctctgccagtgtggagccttcctaggcatcagttactaggagagattgcccggtcaaagaccttgcttaacttgaaagctcttcttcccaaagccataaagctcctaacacccagctctgacaccccttttaaacgcactcattagcctgtctataaccgcttttgccccctcaaatgagggcttcatgtccctaatctcagccttcctgggcactcttcttcagaggcctcgtcctgagctgcagccactgtagcgggagctgtcactgcccctcggctcaccttggtgacggagtcattgacattgatggcaggcaccttgaggatcccattggccatcatcttgtagaggttgtggaccccagtcgtggtctcctcagagatgcctcggatgcctaaacaagaggggacaggacaagcctcagagatgccacacctgtgctcatgcaaattcctcatctttaccccctaaagccattcctctttctgggttcccatctctgtgactgatcccacaggccccccaatcacccagacccgcgtgagggaggagtccccaacgccctcctacagggaagccaccaccaggcctagtgactctgcctccgaacaactcccagcttctctattctcactgccgctgctctagtccgtgaccctgtcgcttcttcccagtctccctaccacaacccatcctccatgcagcagccatttctaacatgtatcttctcagagaaatcttctcaacgccctccagttatttccccttgctctgcaaatcaggtcaaacacttttctattggcctattaggccctgacacatctggtcttcacgaagttcacaccatacccgcagtgaaggctccctttgctcactgctatcctgtgggcctcttttctgtttcctgaacactccagccattcctgcctcagggcctctgcactctgcgtacctgctttgaacaaagctggctccctcccagctattcccaaccatggccctgtctgtgcctgcccttgggccatcagctcagctgccctagcctcgcaccctcagaagtcaggaggccccagcatgaatgccagagcctgccatcctcccatcttccagatcctgctgcttgaggtgatgggagtcctgccaggcctgcggccatcatgtgggcaaacaggccccacccaggccaccagcacccagcccacctgccccgccctgctcacctggcagaagctgcgggtacttggtgtggatgaggttggtgaggtcgcccccgtcgtccagaatcatgttgaggggcccgtccttgaagtacagggtctgctcaatgcaccacaggtactcctcgtccgtttcgcccttccaggcatacactggagggtgagtggcacatcagggcctggacttcccaactggtacctgctccagggaacaactctggcagagccaaaactacctccttcccaactcccatccccagccacctccggcccctctgaaaactcagcagtggtcaggacacaacttggagccagatagatctgagttcaaaccctggctctgccacttgccagctgtgtgaccttgggcaaatcacttcacctctctgagcctcagtcttctcctctgtaaatagggctcacaatagtatggattaagtgagacagaagccatgtacagccccccgccccagatatagatatcaggaaatcattctttcctttcccatccccttctgcctgggcgccaaggactgaggcatcaaccctgagtgaccagggcttgataccccacaacgcctccccctcagcaggatccacacggcaggatccagggtttgctctgcactgaaaggactggagcactagcagcctctgtgtgggggaatctcaggcaaagtctggccaaaaaatgactacgagcagctaccatgtgtggggtacttgctttctgccagacatgactctaaatcctccataccccatctcattcttcctcatagaaaccctgtgaggcagccatgaccattatcatcacttacagatgcccagagaggagctaagacgcacttgggccactctaaatgaaattccagaatagacaccagaactgagggctactgaccaccagcccacactcctcccatgtggcatgactagggcacaggtgtggggttcccaggagcctcttgtgagcaaaggacgctggccaagcagagccagctgcttctacccacaactggagcagacaatagtcttaagaattgcagtgagccaagatcgcaccactgcactccagtatgggcaacggggcaagactctgtctcaaaaagaaaaaaaaaaaagaagaaagccacggtgccaaggctgaggaatggggatcatgcccattcagccctggtcagtctgtgaaggagtgctgtgccaccccctcctgtccacctgtggttggttagaagcaatcttgaatgtcctaatcactgggtcagatctaaccactcccctccccaagtccaagcagacatgtgcccagcctgtgaaaactccattctcgttagacttggtccttcctcagtcctttagaccgccataccctaggcagtgaacctctttttctgccccgtagccctccccagttctttggaaagagatccacatccttcctttaatgaacttcccctccgcttcatcatgtagttcccaatcataagatcttgctcttcctggttacacggcttgacctgggtcaataaacaacttccacaggattttagatgatgatgggacaaagcagctctttcctgtggggtcgctgggctaggattttgtggcggtgactcctctccctttctgatatgtaaggaagtctgttgctctagcagtcagtgaagcaaagagggcagaatcccttcacaaattccacgtctcagaagcaagcaggacttacccggaatgccagccttggcaatggcagccgccgcatggtcctgggtggagaagatgttgcagctggaccactgcacctagaagagccatcaaaacaaggctgttggtcactgatggctcaaaagcaccagggacgctgggcgaggaaaagggagagcttcgggtagtggggagaggcttgggatctaggcacagcaagctctaggatcacaggctggggatgctgggtgggcagatgggagccagagcaggggcgagatccaactcaggttttaaaacctcactccagtgctgtgtggaagggaaagggtggaagcaaggggacaactgcagagactgttggagaagactccagacaagaaatatgacagtagcagtggagatgatgagaagttgtcacatcctgggtctactctgaaggctgcactgacaggatttgcagagggatgagttgttggagtaaagggagttgggagtggggaggaaagggaggggaggagatgactcccagattcgtgaattgagagaacccagaaggctggaacagaggttccatttactcaggtggggaaggctttgggaagaagagggggcagaaaatcctgagtctgtttgaacgcgttctgcctgagatgagtactagacctccagggagcgtcaacgcccccgctcctggatatgccagtcttgagttccaggagaagtccaggctagtacaaaaatgtgacagtcatcaccagatagtgtctaaagctataaaatcagaccgccaagagtgaatgctgaaaagaaagaagaggtccaaggactcagccctgagcccctctgtggattttggctccattgccctaccctgctttgggaaaccagcttgcttcttgactctctgagaccttaggagagctgttaatcattggcacacatgacccaggctgaaccaatcagagctgccatcatccagcagccatgatgggtccagggtaggcctgtgacccccgaagggccaaggcaagctggcccttaagagactaagtaggacatgggtgttgaatttttcctgccagagcatccatcaggaggatgccttgagggtagccaacagtgaccttcccagccagggagaaaatctgcagaacactcaccacaaggggtggcagcactgggaaacggaggaaaccgagtgagagggaggaacccctccaggcccgcggtcagctccacacctggaaggtccccaccctggcacagtcgtcttcttccctggctgaacccagggagggcaaggactctggggtgatacagctgtgggcctcacctcagcacccagggtgacgagggtctcaatgaggacggccgtctccacggtcatgtgcaggcagccagcgatgcgggcgcccttcagtggcttggaggccgagtaccgctcccgcatacgcatcaggcccggcatctcgttctcagcaatgtccagggccttgcgtccccaggcagccaggccgatgtcggctacgggaggaaacaggtgggagttccgtgagtcccctcatcccaccaaccaagaggggcggtcactgcatggaccccgatccacgtgtggactcaacacactagggcttagcactctgtcaccgcattctctcactcatgcaacaagtatttatgaagccagagtactcaagaaagacacggtccctgcctacctgcacctttctgacttgtgggagaacacatttaatcacacagggacacaaaaattacaacataaagaagcgtccctttgaaaaatagctcacatgatacttcccactaccctgcctttctgctgacacctaccaacctccaggccactcctcactccctaaagactccctaaagatgttagctgctggttctccatcttcctctctcagtcatcactctcggtgattcaacacttataaatactatctaacattttggatttgacagttccttgatctccttttagatgtaaaaatgcttccccactcctgatgtttctttccacctggaggaactcatccgtataacgaatgctcttggcctctctgccccaggggaggtggggtgagcttgtctgaccagtaaaactgagaggaaaaaatggtgtgctcagcttagctctcccttctttttgcaagcaagcactcacctgcccacttgcaggaagctggtgttctctgcttttccagagaccaacctaccctggcccaccttgcctgcaactgattgggtaactgctgaatctgggggttcaataagcaggatcatttggatttcatattaatctatatcctctggctttgaggttattagtaataaaaggtaatatttcaggtgttgccacctaaaatactaatctacatcctctggcttcatggttactagtaacaaaaagtatttcaggtgctatctgccacctaaaatgtctcgaatttgttcaaattctcaggcaggaaagaaggatattattatgagctaactcactatctcaatactctcccctaccacactggtccacttccaaggtcataccctaggtcagtccctaggtcaaagtttgcagacttccccggtaagggatgttcctctggcatgcttgtaaatctcccctggaaaatatgattcagcaggtctaagactcctggtgatttttatctttagggaagctgagatcctgccaaacacccaaagaggtaggcggtgggaggcaaaggactctgtagagaatttaataatctaagaatttaataatcaataaaattgtctgtcagtcagcttcctacagtgcattttaacaatttcagagatgaaacacgcctcccgcatgagagaccactccggctgtgcctcaactcaagccacccaccccagccctcctaccctagtaggccatcaccagtgatagctctccttggaaatctggacttcaagcacccaactctagccacgcctcatctttctggttttctccttccagaggccaagctccaacaaggctgtggcctgtcaggtgagaacctctattcaattcatcctaccaatttctagtgtcccttctaccccctttccctttgagaactcacttggcaaaactctcagcccaattaaacccgaccctccactgcaccggacccactgaacccagcaggaggacaatcacaaccccaccaagacatcatatttaattaattaattaattaattattttagagacatagtctggctctgtagaccaggctggggtgcagtggcgcgatctcggcccactgcaacctccacctctcaggtcccggttcaagcaattctcctgcctcagcctccccaatagctgggattacaggaactcgccaccatgcccagctaatttttgtatttttagaggagacggggtttcaccatgttggccaggctgatcttgaactcctggcctcgtgatccacctgcttcagcctcccaaagtgctgggattacaggtgtgagccaccacacctggccaagatatcatatttattaagaccataaaagacacatagcacattgcagcaatcctatgacattttcctagtaaatttactcccattttctactctcctcaaccctccaacacctttccccattgaatgacaatctcacttcccaattcactgagatgaattcagaaccaggccacttttcccctatggaatccactagtcacctatagcagtcatctacagcttcagaccaggcactctttcctgttaccacagatgagttgaatgggcgcggtggctcacacctgtaatcccaacactttgggaggccaaggtgggcagatcacttgaggtcaggagttcaagaccagcctgaccaacatggtgaaaccccgtctctactaaaaatacaaaaattagccgggtgtggtggtgggtgcctgtaatcccagctactcaggaggctgaggcaggagaatcacttgaacctgggaggcagaggctgcaatgagctgagatcatgccactgcactccagcctgggtgacagagtgagactcggtctcaaaaaaataaaataaaatagatgagctgtcctgtgggcggcaagccacccaggcaccgaggcaagagacagaggacacgagctgttccagtataataaaatataaaacaagaatagttatactagatatagatcttatatatgattatatatgaatatcattaatcattagtttgtagcaattactttttattccaatattatgataatccttgctctataatcatagcctaggaaaaaccaggccatacagagataggagctgaggggacatagtgaggtgtgaccagaagacaagagtgcgagccttctgttatgcccggacagggccaccagagggctccttggtctagcggtgacgccagcgtctgggaagacgcccgttaccaggcggatcgtggtccagcggtagcaaaaggtgtcaaggaacaacacccgctacttagcagactgggaagtggcggcggcgggaggggggggggtgtctccctttccccaggggagtttagaaaagactctgctcctccacctcttgtagagggcctgacatcagccaggctcgcccacagttatccagaggcctaaccatctccctgtgatgctgtgcttcagtggtcacactcctagtctgccttcatgttccatcctgtacacctggctatgccttctagatagcagtagtaaattagtaaaaatactaatagtccctgatatgcagaaataattgcgtaagctgtctttctctctgtctcctctccctccctgcctcggctgccaggcagggaagggccccctgtccagtggacacgtgacccacatgaccttacctatccttggaggtgactcacattctttaccctgccccttctgccttatatgcaataaataacagcgcagcccaacattcggggccactaccggtctccgcgcattgatggtagtggtcccccgggcccagctgccttttctcttgtctctttgtcttgtatctttatttctacactctctcgtcgccgcacacagggagagacccaccgaccctatggggctggtcactacactatccctgctccatggggcctgattccatatcccctctcctccttaaggacttccatactccactaaaactgctcttccgtccaaagaccagcctgatctccatacctgatgcaaaattacctaagaccatgtttctaccagcagcacagattgcatgaatgacttgccctccttcctgaaaccctttctttacttggcttctgtgactgtcctgtgcttttccacctaccttcctggttcctctttagctaacagactttagggtttgggggccctcagggctccatcatctcccagttctcttatgtttaccaattaagctcatccagtcttatggctttacataccttctctacggggatgactcccacgtatttatatccagcccaaactactcccctgaacttgagactcgatgtgatccaactgcctccacagcacctccacttggatgtccagttggatctattatgtgtcatgttggagtcctcatggctcctttgcccccactaccggttactctcccaatcttcccattttaggaaatgaaaccaccattcaaccagctactctgcccaaaaacttaagatttgattcctcttttcctctttcacctcaatcagcacgtttttggctcaacaagtgaaatatataagcaatccaactgcatctcaccaccttcatctaaactgtcacttctcaggctgggcgcggtggctcacagcctgtaatcccagcactttgggaggccaaggtgggcggatcacccgaggtcagaagttcgagagcagcctggccaacatggtgaaatcccatctctactaaaaatacaaaaattagttgggcgtggtggtgggcacttataatcccacctactcaggaggctgaggcaggagaattgcttgaacctgggaggcggaggtggcagtgagctaaaatagcaccactgcactccaacctgggtgagagggagactctgtctccaaaaaaaacaataaagaaataaatacactgccacttctcagttggacactgccacactctcttcactggtcccatgctctaacatgccattctccccacagcagccagaagagggaggctcttaaaaatttaagttacatcacctccatcattctactaaagtaaacaaaactaaacaagcaaaccctccaatggcttccctcaatcttcgggccctatctgcatgactgcctgcccctcctccatctctccactttccccactcactagctgttcaacacacaggcttcctgactgacttcaggcaagctccactcatttccacctcagggctttaacccaagcagttctcggcctggaaggctcctctcaagcacctaatacagtacctggcacacagtaggtgctgaaaaaaacctggaaacaggaaagaacctagtatatccctgctagaggaaccaagagtgcaccagggtgactcaaatagaggcataagatgagttgggacttcagtcccagtgaagtggggaacctacagttttcaggggccagcattcagagaccagatttgtcttttgaaaagaccccattggctgctgtgtggatctgcggagcaagagatccagggagacctgcaaggagagagaccagactggggtggtgaccgtggagacagacaagtggcagatctgctcacataaaatggagacaatactactttatctgtatgcatgtctgtgccacccctgtctctgggtcacctttgtgtctccagcatgacctggctcagagaaggggtcagcaactgtttaccgaccatatctgtcctcagaactgaatgaaagatccatgagaggggctggcacgtgacaagggtggcaaagaaaaacaacacaaatctgaacctagtctgagtcccagcatttactaatgacccagagaggacccagagaggagtttgctgcaggttccatagccaattaaccgcagaaccagaactggcagccaggcagggctagagcagaggcccctctcaaggcccctcctgggaggggcccggctgtatgggacaatgggttatgccctgtgctgctaagctccacccctccaccaccacatgtccctccagctaaaaataactccttcagtgccctcgaggacactgtgccagccccacagttttccctgggaccctcaactccaaaggcacaggagaggctagatgctgcaatctctggagctaaggacttgcaaaagtcacaggaacacctgtccccaggacaagccaagaggaacagcaagagcccctgtaaacatcagtttcttcatctgtaaagtgtggataatcatccctagcttgctatgcgccttaagtaaagataatgccatatgatcaagatctggcatacagcagggcctccttcctccagccccacccagctaagctccccatccccaaatccagctttatctccacccacacaacccaatggccccaatcctgacccactaatctctccacagtatgacaagcccccattccagctctactattgatgtgaccttcacataacctttctgggttcagtttcagcatccacacaatggagacagtctactctggtagcaacttgatgaactacttcaacagaatctttgcaagtcacctcccaagggcctcagtttcatgctctatataacgggattacgtccacctctatgaagattattgtgtaaacacacgtaaatcaccagatatacagcaagtgtttccataaatgtggatggcattctccagacttaatagtgtctttttttgtttgttttttttttttgagacagggtcttgctctgttgcccaggttggagcgtggtggtgcaatctcggctcactgcaacctccgtctccccggctcaaacagtcctcctgcctcagcctcccgagtagctgggaatgaaggcgcccgccaccacgcccagctagtttttgtatttttggtagagatagcgtttcaccacgttggccaggctggtctcgaactcttgacctcaagtgattcgcccacctcggcctctcaaagtgctgggactacaggggtgagccaccacacccggtccaatagtgtcaaagttacttgaaaagctaccagccaaactgaactggtttttgctgaaaattcactaggattgttccgcgtgtattcgcttgcacacagtggtgaaagggtgcgctcagagatctagatggcctgcgttccaatcttgctccatcaccaccagctgtaagactgagggcaagttacctctgcctcaggattctcatcataaaatgagaacagtttccctatagagccatgagactagaataaagctagaaggcagtgccgatcccacaggaaacactaagtaaacgttaactatccctgtattacacttcaatcggtgggacagcaggatttttcaaaccactccaaattttcttcgagatttctgcaaggctgcccctgctggaggggtgggggaccccacaggttgggtaactggcccaaagtcccaggggagaggaggatcggagccggcctggggctcgctttccaggcctctcctcatacaccctccggggtgccctcgccgtccctgtaggaggcccagagaggggtggacgctcgtcggggccgcccagctggacagggtccggtccaggcctaggaggccgggcgcaggccccccgagcagggtccggcaggtgccagccgtcccaggccgtggccaggtgtgctctcccgcggagcacgccgccagtttgcggctcgcagaccgcgcggcggccccggcgtcgcggggcatgctgggacttgtagtccacggccacccggaacggcccgctcatggccgcgcgagaactccaacttccagctggcttcgcgcggccagaaacgcgccgaggctgcgattccagggggtccagagagccccgagtcggccctgcagcccccgccacgaacaagccccgggcgggtgccgggcggccgcaaccggctgcaggtcctgggactcaccgactttgtagggcagtttgtcagacatgctggcggcactcgtgatggaaacgggcgaagggggctgggcctcagtctgggaacaggaactgggcgggcagcgccgagcagggatatgcgcgtggcgccgacgcctttaaatatcttcctcgcacttgcatattcatgacccgctggggcggggcccaacgcgcagggcggagccggaggggatttcgatccctgaaaagaagcctcagaatttcacaaggcgtggccccaggagtctcactcaccggtccggaagggagcgccgggagaggcctgagagccagccgggccgtcctctcgctggttcagccagttgattcagtgtcaaaacccagcggaactgaaattccgccagttcacttccctgtgcctcaatttcctcatctgtaaaatgggccaaatgacatctgccacacagattattataagtaaagttgcaggccaggcgcggtggctcacacctgtaatcccagcactttgggaggccaaggcgggaggatcgcttgagcccaggagttcaagaccatcctgggcaacacagtgagacctgaactctacaaaaaaaaattaaaaattagccgggcgtggtggcgcgcgcttgtggtcccagctacttgggacgcggaggcgggagggaggatcttttgagcctggagatcgaggctgcagtgagctatcatcccaccacagcacttgagcctgggcgaaagggcaagaccctatctcaaaaaaaccaaaacaaagttaagttgccatttgtcaggtacctactgacatcccaaacattcgccttactccaagtaaccaacaccctgaatttaagtaagtttgcatacatttcttatacttttactgcatccgtatatcattaaatagttctgtgtttagcacctttatatatcaaccgtatttacccttctgcaacttgcttttttctgtgagcattatatttatgagactcatgcatatagcttgagtatattcatttttgctgctgtataattcagtcatcccaggcatgggaaggggaaattggtttcaggacctctgtggactccaaaacccttctatgttcaagtccctcatataaaatgaggcagtattggcatataacctatgcacattcctccgtacactttaatcatctctagattacttataactaatataatgtaaatgctatgcaaatggttgttttgtaatttgtattatttttatagttatgtttttttaattgctttttttcccctgaatttttttttttttttatggagtctcactctgtcgcccacactggagtgcagtggcaccatctaggctcgctgcaacctccacctcccgggttcaagcaattctcctgcctcagcctcccgagtggcttggattacaggcacgcaccaccacacctggctaattttgttttttctttttttgagatagagtttggcgcttgttgcccaggctggagtgcaatggcatgatcttggctcacaccaacctctgcctcccggattcaagcgattctcttgcctcagcctcccgagtagctgggattacaggcatgagccaccacgcctggctaattttgtatttttagtagagacggggtttctccatattggtcaggctaatctcgaactcccgacctcaggtgatccgccagcctctgcctcccaaagtgctgggattactggcgtgagccaccgtgcccggcctctactcattttttaacctaaaaatgagaaaagaattaaactcttctggccgggcgcgtggctcacgcctgtaatcccagcacattgggaggccgaggcgggcggatcacggggtcaggaaatcgagaccatcctggctaacagggtaaaaccccatctctactaaaaatacaaaaaaaaaaaaaaattagctgggcgtggtgtcgggagcctgtagtcccagctactcgcaaggctgaggcaggagaatggcgtgaacccgggaggccgagcttgcagtgagccgagatcgcaccactgcactccggcctgggcgacggagggagactcttgtctcaaaaaataaaaaataaaaataagaattaaggtcttctatgacatagtaaatgtattggtctcacttgatctgtacatctgacctctgtctgagagtcatgagggccgatgtcaagcagagacttcctgagggaacgagggtccacgcctgggaggtgggcagcagggtcctcacgcatccctttcagcattctgcagtgcattgcagtgtgtagtgagtcgtgtcagtctaactaaacgtaggatcatgttactaggttgtcctacgagaacagaaaaatggcttcaaaatattcctgcaaagaaatggcaagttccagatactgtgaaaattaccagcacagcaaacaagtagaaaaggacacagctgacaggtctctttctggtatgaatgctggtctttgtcagccatgttgtaaggaatgtaataaaatttgagaaaacaatgaaaaagacactttgaaatatgaatttacggaccaggcgcagtgactcacacctgtaatcccagcactttggaagccggggcgagtggatcacttggggtcaggagttccagaccagcctggccaacatagtgaaaccctgtatctactaaaaatacaaaaattagccgggcgtgatggtgcacgtctgtaaactcagctactcaggaggctgagggacaagaattgtttgaacccaggaggcggatgttgcattgagccaagattgcgccaccgcactccagcctgggtgacagaacaagactgcctcaaaaaaaaaaaaaaaaaaagaaaaaaaaagaaatgtgaatttacatgccctctcattaattaatgatgactctcatcctcactgtatatcgtgctttgagatatcagctaatgagatatttgctaatatttgtaccgttaagttcatatgaacaaaactttggagactgctggtctcaggagaaggtctaagcaccttagtctggccttatgcaacctctctagcagcagaatgttctagcctatggatatattgcaattgatatagccaatttcctattatttcagcttctttttttttttttttgagaaagagtgtctctctgttgcccaggctggagtgcaatggtgtgatctcggctcactgcaacctctgtctcccaggttcaaagtgattctcgtaccttagcctcccaagtacctgggattacaggcacacgctcccacacccggataatttttgtatttttaatagagacggtgtttcaccatgttggccagactggtcttgaacttctgacatcaagtgatcctcccgccttggccttccaaagtgctgggattacaggtgtaagccaccacgcccagccaggttcttttaatggatgaacagttaaacaaattggtacagccataccatgaaataatactcagcaaaaggaataaactttgataaatgcagcaacctggatgaatccttagagaattatgctgagtgacaaaaaccaattccaatatattacatagtatattatttcatttctataatattcttgaaatgaccaaattatagaaatgaaccacagattagtggttgccaggtattaggtaggggacgggagcaagagagaggtaaatgtggctgtaaaagggcaacatgaggaaactttgtggtgatggaatgttctggatcttgctttatcattgtcagtatcctagttgagatgttttattatggttttgcaagatgtcaccattgggagaaagcgagcaaagggcattgggatttctctgtgttttctttgtttcttttttctttttctttttttttttttttgagacagggtctgctatctaggctcacagcaacctccacctctcccaggctcaagccattctcctgcctcagcctcctgagtagctgggattacaggtgcatgtcgctaccacccggctaatatttatatttttagtagagatgggctttcgccatgttggccaggctggtcttgaacctctgacctcaaatgatccacctgcttcagcctcccaacatgctgaggtttttttgttttttgttttttgttttttttgtcggagtttcgctcttgttgcccaggctggaatgcaatggcaaaatcttggctcactgcaacctcctcctcccaagttcaagcaattctcatgcctcagcctcctgagcagctgggattacaggcacatgccaccgtgtccagctaattttgtatttttagtagagatggggtttctccatgttggtcaggctggtctcgaactcctgacctcgggtgatccgcccgccctggcttcccaaagtattgggattacaggcgtgagccaccgtgcccagccccctgtgttttcttacaactgcacatgaatctacaattatctcaaaataaaaggtttaattacaaatgataatgttcattgttggtgagtgtatggcaaagttttgtcacccattaaattaaaaaaattttttaacttttattttagttcaggggtacctgtgccagtttggtacataggtaaactggtgagttgggggtttggtgtacagattatttcatcacctgggtacgaagcacagcacctaagtttttttttttctaaacctctcccttttctcaccctcatccctcaaatagggcccatgtccattgttccctctctctgttgatgtgttttcattatttagcttccacttataagtgagaacatgctgtatttggttttctgttcctgggttagtttgttaaggataatggcctccagttgcatctatgttcctgcaaaggacatgatcttgttcttttttatgcatgcatagtattccatggtgtatatgtaccacgttttctttatccagtctaccattaatgggaatttaggttgactctatgtctttgctattgtgaatagtacctgttaaattttaaaagatttggccaggtgtggtggctcaggcctatagtcccagcactttgggaggccaaggcaggtggatcacttgaggtcaggagttcaaggccagcctggccaacatggcaaaaccgcatctctactaaaaatacaaaattagccgggcatggtggcatgcacctgtaatcccagttacttgtgaggctgaggcaggacagttgcttgaatctgggaggtggaggttgcagtgagccaagattatgccactgcactccagacttggtgacagagagagactctgtctaaagaaaaagaaaattttttttaagtatttgaaatccataattatacccaattttggagagtatcaagactaggaaccaaatttctgaagggtaattaatttggcaattttttttttttttttgacacagagagttgctctgtcacccaggctggggtgcagtggtgcgatctctgttcactgcaacctccgcctcccgggttcaagcgattctcctgcctcagcctcctgagtagctgggattacaagcacccaccacgatgcccagctaattcttatatttttagtagagacggggtttcaccatgttggtcaggctggtcttgaacttctgagcccaggtgatctgcctgcctcggcctcccaaagtgctgggattacaggcgtgagccactgcgcctggccaattttttttttttttttttttttgagatggagtctccctctgctgctcaagctagggtacagtggcacactctcagctcactgcaacctccgcctcctgagttcaagtgattctcctgcctcagtctcccaaataagtgggattacaggcatgcaccaccacacccggctaatttttgtatttttagtagagacagggtttcaccatgttggccaggctggtctcgaactcctgacctgaagtgatccacctgccttggcctcccaaagtgttgagattacaggcgtgagccaccacgcctggccggatttatctatttctatctattagtttttgcttcacatattttgcagctctgttttccatacatacacacttcggagtgctatgttttcttagtggattgaccttttatcattaataatgaaaatgagccaggagttttggtgcgccctgtaacttcagctacttgtgagttggaaggatcgctggagcccaggaattcaaggccagcccgagcaatatattaacagcaagacctcctctcttaaaataaaaaattaggccaggcacagtggctcatgcctgtgatcccagcactttgggaagccgaggctggcagatcacaaggtcaggatttcaagaggaaacccctgtctccactaaaaatacaaaaattagccgggcgtggtggcaggcacttgtaatcccagctacttgggaggctgaggcaggagaatcgcttgaacccaggaaggggaggctgcagtgagccgagatcgtgccattgcactccagcctgggctacaagagcaagactctgtctcaaaataaataagtgaattaattaattaaagaaagaaaaaagagaaaagaaaagagagaggaggagcaggacagaaggaaggagggagggagaaaaggaggtagggagggaaggagggagggaggaaggaaggaaagaaggaaggaaggaagggaaggagggagggaagggaaggaaggaaacaatagaagaaccatggaggtggaggggtgccttcttagtgccaggttgggggtgaaagtccaggctccctatgtggcttggggaaattgaatgatgaattttttttttgagacagagtctcacactgttacccgggctggaatgcagtggcgcgatcttggctcactgcaacctccacctcccaggttcaagcgattctcctgcctcagcctcccaagtagctgggattacaggcgcctgccaccacgcccagctaattatttttatttttatttttaatagagatggggtttcactatgttggccaggctggtcttgaacgcctgacctcgtgatccacctgccttggcctcccaaagtgctgggattacagacgtgagccaccatgcccggctgattaattttatttttaagtttactatcacatggataaaaagtttacagtttaataacatactattggtaagagtgtggggaaacaggcctcctcatactttggttttgggattgtacattggcacaaccttaatgaacaacactctggtaataactaacaagattacaaacccgcatgccctttgaccaagcagttccacttctaggaatttattccaaagatgtttgtacacatgagcaaaatgacgttaagaacaaaagactgtccttccatggaagacttgttaaataaatattggtacagtccacatgatggaatatgcagatagccatttttttgtttaaatgagctgtttatctaacaatatagaatgatcttcaagatatggtggcccagtgcgatggcccaagcctgaggcctaagcgccactgcactctgcctgggcaacaaagcgagaccctgtccgtattttaaaaaaacgacagtcgggcgtggtggctcatgtctgtaatcccagcactttggaaggctgattcgggcgggtcacctgaggtcaggagttcgagatcggcctggccaacatggcgaaatcccatctctactaaaaatacaaaaattaggcgggcgtggtggcacacacctgtaatcccagctactcagtaggctgaggcaggagaatcgcttgagcccggtaggttgcagtgagccgagattgtgccactgcactctagcctgggcaacagagtgagactctgtctaaaaaacaaacaaaacaacaacaacaacaaaaccaacaacaaaacatataatgaaggacaaaaagcaaagtgcagaacggtgcgcctagtatgcgattatttatgtaaaagaaagaaaagaacacacaaacaggtatttgcctatacatgcagaaaatataccaggctggatgtacaagaaactgctaacagtgcttccctggggatccccgcccacgccgctgaaagctgccctggacgttaactgttgatgtcccttctccaggtccaggccccagtggagcttctggcgggaaggtcgaaaccccaggcagaagcaggtcccggtccctcctcccgacctttgtacctgccttttccgtgtttgcttttgcaaacaattaggtcctgggcgcggaggggcggagagggggcggagagggggcggagggcgcacaagcctgccctttggccgcggggctttagcctgccctagcttcagcatccccgctcgcctcccggcggtcctgcgtctcactctggattaactggaggcttcgagatgggatagagaggggtgcaggcgctgagaaagcccgctgatggggatggagccggattaagcagttctgtggagttcctcccttcttgtccaccccgctaggggtctctcctttcccgctgtatccacgcccctccctccaggccccctgggcccacctcgaagtcaccgctgggctggggagtacagaggtgggggacttcttagagaccctgggacagggcccccctctctccctcaatccttctcatcccacgcggctccgctgtgagtcgggcgtcccaggagctgccggcccacccatccgcgggtttcttccgttgggggagccctccagactcgtagaatataagagagcgcccctccctagccgcgggccatctctaagcgacaggctttaagaggcaccccgaaagggggatgtgaggtggtgtggttctatatcattatatcgaaatcatctgattatgtgcctgtcccattacttccaggagggacagaaacctgtatggctttgccagctgctgtgtccccagggtccagctcagtgcctggcacacagactgcacacaatatttgggaatgaattaatgttcccagatgtctgccccggaacccacgctgtggtgccccttggcttcagcccacagtcctggctctcctcagggtggagccagggagtcccctaatccaggtctctgacgtcccccgctgaggctggatcgttccccagtggggctggatggcctctgggttcacttcccagccttgtctgagcttccacgccccttttatcctaatatttgctaagagcctcgtccagggaccttaggagtcacacagccaggggttctgcccctgcccttcatttctcagatgatagaaaagcaaaaggaacactctgagaacttgtaatggggaggagtggggggttggtccagtctgacggggcgggggcagggtgggagacgtccttggagcgagatctgaggcagaggagctcagtccacagaaagggagcacgggctccacgctgcaagagtagggagctgtaaggtgccctccccagacggctccattttgcccaccttcctttgcggatagcacccctggacctccgaggtcagcctgtgccctgcagctggagtcgcccttgactccactgtgccaggagagggcaccctgctcccagctttggcttcagactgctgcagtgcaaactcttccctccaggggcaggatttggagcgctgtgatgataacctcccagctgccctgggagaaagcaaagtacagcttatcgctccctcccataggaagaaactgaggttcagagaagagcaatgaatgttgctagtaagtggtctttggacttgttttgaaggggctttagcccttggaagcatttgtcgggatgtttttgttctgttctgttttgttgagccagggtgtcactcttgttcaggccggaatgctatggcaccatcagagatcactgtagcctcaaactcctgagctcaagcaatcctcctgcttcagcctccccagtagctgggactacaagcatgcatcaccacatccagctttttttttttttttttttttttttttttgagacaaagtctcactatgttgctcaggctggtctcaaactcctggggtcaagcaatccttccacctcggcctcccaagtgctgggactacaggcataagccacattgttgggactgctgggtgttgacagtgacacccaggataatgatactagtccaaatttattatatccaatgctccacacacaattctaagctctttgaacttccctgtaaggtagatgttgccctactttatagatgctaccctataaggtaggtacccatttaacacatggaaaaactgaggctcctagtggttgatttgcccacagttaggaagcaccaatgctgtctgactccagagtcgctgctggtaaccactgggctacccttcctgcaatcatgctccctgctgcaacccccatgccagacatgttcatttgagtgtgctagaggcaaggacaaaaaaacaggacaagacaaagtccctgctcccatggagttccattcagtgaacatgtttacacctacagatacatccatacaaaccttcaaacacatactcattcacacatcccaccatcacacacgaatactcatgctcatgcacctatgtacatacatactacagaaataaggccaggtgcggtggctcatgcctgtaatcccagcactttgggaggccaaggcaggtggatcactgaaggtcaggagttcgagaccagcctggccaacatggtgaaacccgtctctactaaaaatacaaaaattagcggggcatgctggtacacacctgtagacccagctacttacttagaaggctgaggcaggagaatagcttgaacccagcggaagaggtcgccgtgagccaagatcgcaccactgcactccagcctgggcgacacagcgagactccgtctcaaacacacacacatgtatatccacactcatacacttcatacatacattcacacattctcaagtactcacacatattcagaccctcacctttgcacacactctgttaggttagacaaaaatcagctctttttattttttaaaaaatttttgtagagtaagggtctcactatgttgccaatactgatctcaaactcctgggcttaagcgatcctcccaccttggcctcccaaagtgctggggttacaggcgtgagccaccacatccggctaagatcatccctataacattgacctgtgctttaactgccagatacctggagcccaagattcagctagtaatctgagagctgtttgtgacaccactcccttcctcttcccttccattgatcccacaaacattgttaactgcccactcagggcaggcaacacagatgactcagacctgggccctgctctcaaggaatttcctagccagtggggaaaaaagactcaccaatgttcacgacacagatcatggatgccagggcaggtcagagcagagagtccaaggtggagggagagggtgactcactaggcctaggggctgtggaaacctctcagaggaagaggcgtccaccaaagtcttcaaaatgagtcaggtagagagagaactgtgcaggtgtgggaatcacatttgcaaagtcatggcagagtaagaaagtggggacaaaatagctgggcacagaggctcacgcctgtaatcccagcgctttgggaggccgaggcaggaggatcacctgaggtcaggagttcaagaccagcctggccaacatggcgaaaccctatctctactaaaaatatgaaaattagccaggcatggtggcgggcgcctgtaatcccagctacttgggaggctgaggcaggagaatcacttgtatctgggaggtggagtttttagtgagcagagatcatgctactacactccagcctgggcgacagagcgagactctgtctcaaataaataaataaatataaaaactgggggagtttgcatggagccccatatttccagcttctcttgagaaaattatctagcaactagacttatgttgtcatagcaatgggtgggtgagctaaatgttagctgccttctttgaatgatgcataagttctcgaggccaacatatgtccccatccctggcccatatcggttgttgatccctgacttgaagttttctcagtggaccaggatcatcccaatgagcattggttgtcattaaataaccttggttctcatttgcatagcaccaactgagtcattttcctctacattcaatgtcctcacgttgcaggattcttgtgttgcttatgatttacctatctcctccttttgtcttcttcctattgctgatgtcagtgaggccacctcacataccctgctctcttcctaatggagttgaacccatccagccaaaaacaggagtaggatccacaggaaggggctactccaggaaccactaacactgtcaattgccaatttccaggaactaggagggttttctaccttattccagaaatacggggaaaagaggtgttctgagttaaatgatggccctcctcccaaaggatatgttcacctagaatctgcaaatgtgaccttatttggaagaaaagtctttgtggatgtaattaagttaaggattttgagttgagacaattctggattaaggtgtcccctaaatccagcatcaagtgtccttacaacacaaggaaagggaagaagacagacacagagaagaccacacggtgaagacagaagcagattgagtgatgcatctacaagccaaggaaacctgggattgccagcagtcaccagaaaccaggatagaagcagggaacagactctcctcagagcctccagaaggaacccaccctgccaatgccttgattttggacttctggcttccagaactgtgagagaataaatttctgttgttgtaagccaccaaatgcgtggtacttcataatggcagctctgggagtctaatacagatggaaaggggaagagaagatgggggagataggtggggcggaagcctgatcttgtgactctggtgactcagtttcccttgtcctgccttggaggtggagaatatggagaaggctgaagtgctaagggcaacagcaagagtggctcaggcggtcatcccaaccagcaccccagggctccaatgcctcccaggaaatgagtcatcttggagagccatgggtttcttctcaaatgccttttattgtaagcacatggaggaagtgttctaaggcaacagctcttgagaggatggtggagtgagcctttagggaggcaaatcagccagggctggcatcccaagttcaggagttcacaccaggtgcccattccaggcctgggcagaggggcaacccaaaaggggaaggggcgatgggcagggaaccgtaggagcagagagaaggaggagggcagtagtgaggcttctcaagaaataagagttggatccttcggccagtgctgcctgtttctcccttctcgcacctcctcatattcataagcatttattcagtgccaggactgtgttcacaattaatatttcagtttccccttctataatatatagaatgctgaatatgatagtcctgaaatgtctttttaggacattgtgtggttctagttgccaacctggatcttaaaatgcaaacattgacaataaccccttaaacttcagcttcaaggatggctcctcatagcctctgtgtgagtgggcagggctgggatcatcagacagtgcattttacagaagagaaaactgagggatgagcacctgcctaaagtaccacagagtcaactgtggatgagagcctggggcctggagagctcatgcccatatagggagattgctgtgccggtgttcacttgctatgaaggagcccatcatggggagttgtggtctgagatcctggaccttgggggtaaaagcagagggtccagaaagggacaaagattggcatcacctccccatcatggtctgaggctgattgtgggtaattctctgccctggcctcagtgattctttgctgcataacaaaccacccatatttattggcataaaacaattatttatttatttatttatttatttattattttctgagacggagtctcgctctgtcacccaagctagagtgcagtggcgcaatgtcaggtcactgcaacctccgcctcccgggtttaagtgattctctgcctcagcctcccaagtagctgagattactggtgcctggttcatttttgtatttttagtagggatggggtttcaccatcttggccaggctggtcttgaactcctgacctcacgatccacctgccttggcctcccgaagtgttgggattacaggcatgagccaccaggcctggccacaacaatcatttattattcatttcttttgtttcttggggagggagcattgattggactcagctaggccattcttgctcaaggtctctcatatggctgcagtctggtggtggctgggctggagtcagcttgaagatctcctgatagccagttgatgctggctacctgggacctcagatggggcttccagcaaggatatgatatgtggattctccatgtggcctgggcttccacacagcatggtagctgggttccaagggttccaaggataagcatcctaagagagagagccaggcataagttgtatcaccatttatgacctagactttgaagtcatgtggcatcacttccatcatatttagttgaggtagtcacaaagccccacccaagttcaagagaaggggccatacactattgtcttagttcatttatgttgctataaaggaatacctgaggcttggtaacttatcaagaaaagtggttttgaagcagccttgttgtctggggggtgatacctgaggtttgttgtctcacagctgaggaaataaaggacacggacacacaaagagtgaggttaagagcagaagtttaataggcggaagaaagggaatagctttctgctggagagaggggtcccagagaaatgggttgccagatccatggtgaaatgcaagggagtttatagatgcctggtgaggagacagtgtctgatttacatagggtgtgaaagattggttggaccaggtatgccatttgcatagggcacaaatttctggtagcccccacccttatcttttactatgcaggtaggttctttgcctggcctgttacccatgttgcccattcctttactgtacacgtgataacaaaggaaagatggagcctccctgttggatatccctggtgcctaggtagcccaattttattggcacagctgccagcatttccccatgcaagcttccagcttgcttatctatgtttgcagctcaatttttcaggcttctctttgttagaaaaaaataatttcttgagctgctttttgttaaaagggatgctctgtagaggactgttttgccctcactatctgcctaaataattcctttctacctgctgtatcagtttattggctcatgattctgcagactgtacaagaagcatggtgcccacatctgcttctggtgattggtgagggcttcaggctgctccactcatagcagaaggtaaaagggagccatcctgtgcagacatcacacggtgagagaatggatggaggagagagggggaaggtgccaggttcttttaacaatcagctcttgtggaaattaatagagcgagaacttcctcattaacatgagaatggcaacatgccattcatgagggatccacccccatgacccaaatacctcccattaggccccacctctaacattggagatcaactttcaacataaagtttgagaagacaaacatccaaagtgcagcaactagctgttgatgggggagtgacaaggttctagaagatgtaaatcaataaatggttgggagcagtggctcacacctgtaatcccaacactttaggaggtcaagtctggcagattgcttgagcccgggagtttaagaccagcctgggaaacatggcaaaacttgtctttgcaaaaattatctaagcatggtggcacctacctgtaaagataatctttacctaatgtaaagataattgaagtaggaggatcacctgagcccgggaggtcaaggctactgtgagctgtgatcatgccactgaactccagcttgagagacagaataagaccctatctcaaaaaaaaaaaaaaaaggttcagtggctcatgcctgtaatcccaacactttgggaggtcgaagtgggtggatcacttaaggttgagagtttgagaccagcctggccaacatggtgaaaccccgtctttactaaaaatacaaaaattagttgggtgtggccgggcgtggtggctcaagcctgtaatcccagcacttcgggaggctgaggcgggtggatcacgaggtcaggagatcgagaccatcatggctaacacagtgaaaccccgtctctactaaaaatacaaaaatttagctgggcatagtggcaggcgcctgtagtcccagttacttgggaggctgaggcaggagaatggtgtgaacccaggaggtggagcttgcagtgagccgagatcatgccactgcactccagcctgggcgacagggccagactccgtctcacaaaaaaaaaaaaaattagttgggtgtggtggtgagtgactgtaatcccagctactcgggaggctgaggcaggagaatcgcttgaactcgggaggcagaggttgcagtcagctgagactgtgtcactgcactccagcctgggtgacacagcaagactccgtctcaaaaaaaaaaaaagatgtaagtcaatgaaaatgaccaagccaagtctcaatcattttaggaggtttctttgccaaagttaaggatgtgtaccaaggaggcaggtttatgcctttctcgaaaggtgattttgaggacttcagtatttacaggggaaggggtggatattgggggagaggaagaaattttttaaagatgtggctagataagagacaaatgattacatccttttgaatctttgatcagcctttcactgaatacacaatttatatgtgaggtggggtagagaaatagtaacttatgcctctgtctggctcagtggatctgcatttttatataagataatgtaaacaatagggcagaggaagcaatcagatatgcgtttgtctcaggtgagcacagggctgcctttgagttctatctgtcctttgtcaaaagcctgtgaatataatgatcaatttacattgccacagtgaaattcaacagaactgttttagggtaaagatgggcaaattgtgagagaggtatgtagcttttgtctttgtagctttctgatttaggaaccaaatgggagatgggagatgggtttgcgtgacccagttctcagcttgacttttccctttggcttagtgagtttggggtcccaagattttgctttttcacaaagagcatgagggatgggagatgttgtgaccatttctgaaaaatatactttgtcgcaccagataagggggtgagctctggagtcagatgcttggattagaatcctagctttactatttaatgcctatgagtctcagtttcctcatctatgaaatggtactgatagtagcactgctttcaggggattactgtgagaattgagtgagataaagacccaaagtgcaggatatccagcccacgacctatgttcagtgggtatcactgttgttggaacaggtcatcatactaagctctgaccagtgtggttcactgccccaggccattgcctgtttgtatgtgtgttatgaaacctggagaggtgttcaaggatatgtgttcgaatgggtccatgtgcacatgccatgggagctgagcttgagggaatgaatgagtgtgtgtatgtgtttgtcagtgtgagtgggtgtgtaagtggaaacttgggcaggggtttacatacatgagggcacatgcagtgctattgtcagagacgtgtgaaccagagggactccatcttaaagaggaaatgggtaaaatgagaggctgagacctgctgggctgcattcccagatggtttaaggcattcttttttttttttttttttttttttgaggtggagtttctcttttgtcacccaggctggagtgcaatggcgtgatctcggctcactacaactccacctcccaggttcaagcgattctcctgcctcagcctcccaagtaactgggattacaggtgtgcaccaccacgcttggctaattttttgtacttttagtacagactgggggtctcaccatgttggccagcctggtctcgaactcctgacctcaggtgatctgcctgctttggcctcacaaagtgctgggattacaggtgtgagccaccgtgattggcaggtttaaagcattctaagtcacagaataacataggagatctgcacaaaatgcaggtcataaataccttgctaataaaacaggttgcagtaaagaagccaccaaaacccaccaaagccaagatggccacgagagtaacctctggtcgtcctcactgctacattcccactgcagccatgacagtttacaaatgcctttgcaatgttaggaggttatcctataaggtctaaaaggggagggatgaatcatccaccccttgtttagcatataatcaagaaataaccataaaaatgggcaaccagcggccattggggctgctctgcctatggagtagtcattcttttattcttttactttcctaataaacttgttttcactttatgggcttgccctgaattttttcttgcgtgagatcaaagaaccctctttggggtctggatcgggacccctttcctgtaacactatggatgtctgtgagtgtgtgggacagaggagtgagaccttgaggtcaagtgtaagcatgtgtgtctacaactgtgcataattaggactgtgtgtgggtaagttagctggtgagggttataagaatatgagatatggccaagcatgtgtgttagattgagtgtgtatgtgtgtatgagtgttatgtgttttccagaaggtgcttgtccatgcctgatacttgcaaaaaatgagaaaatgtcgaaacaaagaacactttcagagctttacagagatgttcaaagcaaatgaacctctgggtactgtgaccagctgggaagatgaggcgagccaggtggaggggtgtggagaaaagcttttctgaagttcctaatctcactcaggcaaggagccagggaccctattagggtcaagtgcttcccacgcacagttgccttcttagtttagatgacagctgcacatctgggccttcttcctcctcatccccatcataattagtggttaattcgttcattcatacaacaaacatttactcagtactgacttttaagtgaagtttagcctaaacctgactcctcacatattttgaagttcagcctaaaggtttctctgtacattgtgaactataacctaaatggaattgtaaacagactgcagcctactcttgtgccagtcaccgagttttgccaatcaggtgtggccagctattcaaaccgtgttcaaataagacaaaaacgccatgctataaccaatctggttgtttctacagaaacaacattttcctttttctgttcataaatcttcttccaccacgtggctgtgtcataggctatactcataggtcgaaccagagcaacaccatcttgaataggggctgggtaaaataaggctgagaccctgctgagctgcattccaggaagttaggcattctaagtcacaggatgagataggtcagcataagatacaggttacaaagaccttgctgataaaacaggatacagtaaagaagccagccaaaacccaccaaaaaccaagatgacatgaaagtgccctctggtcgtcctcactgttcattatacgctaattataatgcattagcatgctaagaaacagtctcgccagtgccacgacagtttacagatgcatggcaacagctggaagttactctataagggaaggaaacttcacttccaggaattgcacaaccctttcccaggaaactcatgaataatccaccctttgtttagcatatggtcaagaaataatgataagtataatcagttgagcagcccatgctgctgctctgcctatggagtagccactcttttattcctttactttcttttttttttttctgagacaagtcttactctgtcgctcaggcgggagtgcagtggcgcgatctcggctcactgcaacctctgccccacaggttcaagcaattctcctgcctcagcctcctgagtagctgtgattacaggtgcatgccaccacggctggataattttttgtatttttagtggagacgggctttcgctgtgttagccaggatggtcttaatctcctgacctcttgatccgcctgcctcagcctcccaaagtgctgggattacaggcgtgagccaccgcacccggccctattcctttactttcttaataaacttttcactttgtggacttgccctgaattctttgttgcgtgaggtccaagaaccgtctcttggagtctagctagattaggacccctttccagtgacagctgcgtgggagtctctgagcctacactggcttgggaggctgcccattctttgctcaattaaactcttttacgtttaattcagctagtttttcttttaacactactaagggccaggaactgtgctacagcagtgagcgaagccctgtccttgaggagctaatgtcctagaggggggatatatatatatataaacattacacagttattctacacatatataaacattacatagttatactgcacatgtataaacattacatatataaatgtatattacatatataatatatataaaaacatatctatctacacacacataaagatatttgtgtatagatatacacaaatatggtggaactcagtggctcatgcctgtaatcccagcactttgggaggccaaggtgggaggatcgcttgaggccaggggttcaagaccagcctgggaacacagcaagacttgtctctacaaaaaattgtaaaaattagccgagcatggtggtgcatgcctgtacttccacctacttgaaaggctgatgtgggaggattgcttgagcccgggagttcagggttacagtgagctatgattgtgccactacactgcagcctgggtgacagagtgaaacattgtctcttaaaaaaaacaaaaaactaaatatattatgaaccatataatatcaggtggtagtgagtgctatgaaaaaaactaaaagagatgggagtgaccaggaggtaggagacactgtggggaggggtgttgggaggcctctttgcagggcagagaactgagtgccaaagtaagtgtttggagaaagacattttgtgcaaaggaaacagcatgaacaaagacctttaggtgagaacgtgtctggcacattccgggactagcaaggaggttgctgaattagcagtgaagtgagctgagggcagaggggaggaaattaggtcatgaagcagccaggggacagaggtctgtgagcttgtgcagggaggatgatgccccttcctttccttttccttcttgacaccaggatccctataggtcaatgagaaaaagacaaatctcattaaaagaagaaaggaagaaagactgggcagaggacttgaacaggcatttcacaaagcaggatctctgaggggcaggattagtctctgtttcttacaatcaattcgatcttgcttgacacattctccctcttcacatcaaaacttctgctcttgtgacagcgtgagagaccctcactctacaataaaagtaaaacattagccaggtgtggtggcaggcgcctatattgccagctactccaaaggaggtgtgaggattgcttgagcctgggaggtagagcctgcagtgagccctgatggtaccactgcactccagcctgggagacagagtgataccctgtctcaaaaaaacacacaaaaaaacaaaaaaagaagaaaaacagttcttttttttttttttttttttttttgagacagagtcttgctctgtcacccaggttggagttcagtggtgcgatcagggctcactgcaacctccacctcccggattcaagcgattcctttgcctcggcctcccaagtagctgggactataggcgcctgccaccatgactggctagtttttgtatttttagtagagacagggtttcaccatgttggccaggctggtcttgaacttctgacctcaaatgatcaccctgccttggcctcccaaagtgctgggattacaggcatgagccaccgtgcctgcccagttcttttttttgttcttcccctgctctagtcaagagagacaaaagcagttcctgccatcctcccgctctccgtttgctgaggacttcagcccctgccccaaactcttcctttcctcccaagcctgctgtctcctcgggcgatttcacatcccatgaggttgacccatcacacaccttggccctggcctccactttgtctccgccacccactgcaatggccacactttggaccgtatcatactgctggctctagtcagaattttggctacaaataacataaacccaactcaaagtgggtttaacaacagagtggatgctattatcccatgtaacaagaatctggaggctgcgtggctcaagggtatatcaattcagtggacgctctgtggacttcatcaaggacccaggttcttgctgtcattctattctcctgccctcaggtattgactctctcatcaaactggctccctacatgttcacgttactccagacgaaactatcacccctttataacaatggccagagtcagaagataggaaaacttttccagatgtgctctccttctcctcctactcccactacttgtcaatacacttccctaggccgggcgtggtggctcatgcctaatcccagcactttgggaagtcgaggtgggcggatcacgaggtcaggagatccagaccatcctggctaacacagtgaaaccccgtctctactaaaaatacaaaaaatcagctgggcgtggtggcaggcacctgtagtcccagctactcaggaggctgaggcaggagaatggcttgaacctgggaggcggagcttgcagtgagtggagatcatgccactgcactccagcctgggtgacagagcgagactccgtctcaaaaaaaaaaataataataataaaataaacttccctagtgaccagaattacattgcctaaccttgactaaactaaatgttgatgggtcaaagtgtattaaaaaagaaacgtggctgggtgcagtggctcacgcctgtaatcccagcattttgggaggccaaggctggtggattacctgaggtcaggcgttcgagaccagcctagccaacatggcgataccctgtctctactaaaaatacaaaaattagccgggcatggtggcgcgtgcctgtaatcccagctacttgggggctgaggcaggaggatcacttgaacttgggaggcagaggttgcagtgagccgagattgtgccagtgcactccagcctgggcaacagagcaagactccatctcacaaaaaaaaaaaaaaagaaagaaacgcttcttatggacaaagcagttggaggttggcttgtgggtaggctatccagggctggtatggcagcttcatggtatcatcaaaaacccataagcttaggccaggcatggtggctcacacctgtaatcaagcagtttaggatgcggaggccagaggatcacctgagcccaggagttcaggaccagcctgggcaatgtggtgaaaccctgtttctacaaaaaatcccaaaacattagccaggggccaggcacagtggctcacacctgtaatcccagcactttgagagaccacagccagaggatcatttgaggtcgggctttcaagaccagcctggccaacaaggtgaagccccatctctactaaaaatataaaaattggctgggcattgcattgccaagataatcctaagcaaaaagaacaacgctggaggcatcacgttacctgacttcaaactataccacaaggctacagtaaccaaaagagcatggtactgctaccaaaacagatgtatagaccaatgaaacagtacagaggcctcagaaataacaccacacacctacaaccatctgatctttgacaaacctgacaaaaacaagaaatggggaaaggattccctatttaataaatggtgctggaaaaactggctagccatatgtagaaagctgaaatggatcccttccttacaccttatacaaaaattaattcaagatggattaaagacttacatgttagacctaaaaccataagaaccctagaagaaaacctaggcaataccactcaggacataggcatgggcaaagacttcatgactaaaacaccaaaagcaatggcaacaaaagccaaaatagacaaataggatctaattaaactaaagagcttctgcatggcaaaagaaactaccatcagagtgaacaggcaacctacagaatgggagaaaatttttgcaatctacccatctgacaaagggctaatatccagaatctacaaagaactcaaacaaatttaccagaaaaaaacaaccccatcaaaaagtgggcaaaggatatgaacagacacttctcaaaagaagacatctgtgcagccaacagacacatgaaaaaatgctcatcactggtcatcagagaaatgcaaatcaaaaccacaatgagataccatctcacgccagttagaatagcaatcattaaaaagtcaggaaacagcagatgctggagaggatgtggagaaataggaatgcttttacactgttggtgggagtgtaaattagttcaaccattgtggaagacagtgtggtgattcctcaaggatctaggactagaattaccatttgacccagcaatcccattactgggtatatacccaaagggttataaatcatgctactataaagacacatgcacacacatgtttattgtggcactattcacaatagcaaagacttggaaccaacccaaatgtccatcaatgatagactcgattaagaaaatgtggcacatatataccatggaatactatgcagccataaaaaacgatgcgttcatgtcctttgcagggacatggatgaagctggaaaccatcatcctcagcaaactatcacaaggacagaagaacaaacaccacatgttctcactcataggtgggaattgaacaaaaagaacacttggacacagggtggggaacatcacacactggggcctgtcagggggtggcggcctgggggagggatagcattaggagaaatacctaatgtaaatgatgagttgatgggtgcagcaaaccaacatagcacatgtatacctatgtatcaaacctgcaggttgtgtgcatgtaccctagaacttaaagtataattttaaaaaaattggctgggcgtggtggcatgtgcctgtggtcctagctactcaggaggctgagatgggagaatcgcttgaacctgggaggcagaggctgcagtaagctgagatcataccactgcactccagcctgggtgacacagcaagattccgtctcaaaaaaaaaaatttattatttttttaaaatagtaaaatcactaaacttgtgcaatggtagcatggaaattatctgaggtgtactgtatgattgtattttaaccagggtggacatagcttaaattataaaaactaaagatgaaagtacaaggaagcacaagtataaattatacaagtataaattcatgctgcctacttctaagagaactttcattcttcataaccacataacattataatgccactgactcataaggggtttacattaattctatgggggagaacactagaattattagtgttcattttcatctaagatcttttttctctaacattcttggtcctattgaaacattgcagtatgcagaaatactgtaatgttaaacccaagagaaaagccattatcatgtgtacgctggtcatcatgatcagtgtggtacaatttaaaaaaataaactatcatgcccttcatgaaaaaaaaaaattacctgggcatgggggcacatgcctgtagtcccagccacttgggaggctgaggtgggaggatcacctgagacccaggaagtcgaggctacagtgagtgatgatggcgccaccgcactccggcccaggagctgctcatgttattttactggcttaacagtgttacggccaatgtctctgtgattctcttggccttttcctcatgattgtggcctcaaggaatgtattcttccatgagcaacgtgtgatcagcctctccgagtgaggtgccaagagtgttcccgtttaatatctcacaattaaatcagaactatttactgggcatcatttattaagcactgtttattaagcactttctgaatgccaggcaccttaaaaacattccctctaattctcacaattccctacaaagttgagattattatccttatttaaaagacaagaaggtgagaatctggaggttgaaatttttaatttaaaaaaagagagagagagggccaggcacaatggctcaggcctgtaatcccagcaaactttggaaggctgaggagggaggatagcttgagcccaggagttcaagactagtttcatagggagaccccatctcttaaaaaaatttaaaaattagaagggcgtggtggccacacacctgtggtctcagctacttgggacatttgagcttgggagttcaggactgcagtgatcgatgatcctaccactgtactatactccagcctgggtgacagataaaaaccctgtctcaaaaaaaaaaaaaaaagaaaaatgcttatgagcacagactgtgatggaaaggtggaaatgcgacacgtgaagcacagaggatggaggatggaggctggtaccacataggcccttggttgtattttcttttctttcttttttttttttttgttgttgttgttgttgagacggagtctctctctgtcacccaggctggagtgcagtggcgtgatctctgctcactgcaacctccgcctcctgtgccagaaggtgaaagataaaaagattgttatttataacaatcccttttcaaacacacttgagtttacgttaatgaaaggatttggggaaagttccaagataaccacaggatgacgggggctggcttccagaggatccaaccatttggtcagagggttggaagtttcagccccacccccaacctccagggaggggctcaaagtgaagttaatcaccaaaggccaattatttatcaatcatgcctacataatgatgctttttttttttttttttttttttttgagacggagtcttgctctgttgcccaggcaggagagccgtggcacgatctcggctcaccacaacctccacctcctgggttcaagagactctcctgcctcagcctcccgggtagctgggactacaggcgcacgccatcatgcccagctaatttttgcatttttagtagagacagggtttcactatgttggccaggctggtctcgaactcctgacctcgtgatccacccgcctcagcctcccaaagtgctgggattacaagcgtgagccaccacgtccggcctccttaagtgtattttcataatatacatactaaggaataccgtgcagctgttataaagaactagtaacttggctgggcaaggtgtctcacacctacaatcctagtactttgggaggctgaggtgggtggatcacctgaggtcaagagttcaggagcagcctggccaacatggtgaaactccgtctctactaaaaatacaaaaattagccgggcttggtggcatgcgcctgtaatcccaactacttgaaaggctgaggcaggagaatcgcttgaacccagagggcagaggttgcagtgagccgagattgcgccacttcactccagcctgggcgaaagagtgaaactccgtctaaaaaaaaaacaactagtaactctatatgtatctacatagaaaagaaacctcagccaggcacagtggctcacatatgtaatcccagccctttgaggggtggaagtagaagggtcacttgaggccaggagtttgggaccagtctgctaaaacataacaagaccctgtctctattttaaaaagaaagaaaaaagagagaagccaggcatggtggctcatgcctgtaatcctaatactttgggaggccaaggtgggcggattgcctgagctcaagagttcaagaccagcttgggcaacatggtgaaattccatctctacaaaaaaaataccaaacaaaaaaattagctgggtgtgatggcactcaccgtagtagtccccactactgggtagctaaggcaggaggatcacctgaccccaggagctctaggctgcagtgagccaagatcatgccactgcactccagcgtgggtgacagagtgtgaccccgtctcttaaaataaagaaattaattaatttaattaaataagaaaaaggagagagaaagagagaaaataaatctcttagtcacggggttaagtagaaaaagccagttgcagaacaacatggcccccatgtagagcaaaattatgtatttctacatgtttatgccacaaatgcataaaaataagatttggaagtgatcacggcaggaggcagacaaacgcctaggcagacggggcaggtccctggcgaaactccacctccaagacaaagacagcttgaagcctgaaagccaagctacaagtcaaatccacgaatgagactgagaacctgtcttcctatttggtgcgctttcctctgattggtccccacccttcacctagtttacatttacctaccctttcctaattggttttttacactgtccatgcccacctttgagtgatgtctttgctttaaccttttttgcatactcacaatcagcatgtagtccccattctgaggccataaaaagccccagacccagccacaaggagagagaaaccacccccacccccacatcccctctccgctgtgagctgttccgtcactccgtaaaattatctgccctcatcacccttcagtcctccacgtgacctcattcttcttgaacactggacaagagctcgggacccaccaagtgcgggtaccctgaaaggctgtcacactggccctctgcccttctaggacggcagctaccccacgtgacagggccaggggccgactgagctgctaacacaccgaccatccagggggctgtggacagtggaactaaaagagctaattagcacactaataccctctctggggcttcagggtcgcaggcatccttgcctggatgccgccatgtcccccttgaggcaatacacctggtgtgtccacgggcccgcatggagcttgctcctgtgtcagtgcttggagtggctggccagatcccgcactcactcacgtgctccctcctgtaagggggtgagtgcggcaggccaagtagacagggcgcccctgccgtgagtccaaaaaaagaaaaggctgagaaatatcctgcatcagaaggatataaaccacatttatgacctgttatctctggggcaaggattggcagaaaggggctgagtgtggtggttcacacctgtaatcctagcactctgggagactgaggcaggaggattgcttgaacccaggagtttgagacccccctgggcaacatagtgaaacctcgtctctgcaaaaaaaataaacaaaattagccaggtgtggcacacacctgtagtcccagctacttgggaggcttgggaggctgagatgggaggattgcttgagccctggttaagttgaggcttcagtgagctgagattgtgctactgtactccagcatgggtgacagagcaagacccagtctaaaaaaaaaaaaaaaaaaatagaattggcagaaaagccaaaagagaaatgttgctttttttcccctggactctggtcactaactacctatgtgatcttgagcagactgtagcacttctgtgcctcaggctccccatctgtaaaatagggacacattcgtagttacttgataaatggttgtaaggattaagtgagttaacatacataaaacatgataaaacatgaatagtagtgcctgctacaatgttggaattaaatttgttttcattcttctgtgacttttcatggtactaatggtactaaataatctctgtcttgctgggcatggtggctcacacctgtaatcccagcactttgggaggccgaggtgggtggatcacctgaggtcaggagttcaagaccagcctgaccaacatggagaaaccccgtctctactaacaatacaaaattagccgaggtggtggcacatgcctgtaatcctagctactcaggaggctgaggcaggagaatcgcttgaacccaggaggcagaggtttcagtgagccgagatcgcaccattgcactccagcctgggcaaaaagagtgaaactctatctcaaaaataataataataataataatctctgtcttgatcagaagttggggagagtctcccctcaccattccttcagggtcttatgcggaggaaaagctgttaaaaaaaaagtgtaaaggtcaaaagtaataaggaaatcatgccctctgcagggaagcagccaccatacccagcccacacggaacgtggctgtggctgagcagtgcccccagctcctgggtgggcctctcctcccttctaagagtttctgtaaaaagatttttgagttaaaaaaaaaagtgcaaaggattatattggagacagagggttaagacaatgacgctaggataaagacaagcctgtgggtggtggaaaagactgggttgtggggttgaggggggtccaagatccagtaggcctagaatccaagaacagaagctaattatcctagttcatcaaatttaagatccatcattgtaatatacaccactattttatgttctttttttttgagacagagtcttgctctgttgccaggctggagtgcagtggtggcgcgatctcggctcactgcaacctctgcctcccgagctcaagtgattctcctgcctcagcctcccgagtagagtagctgggactacaggcatgcgctaccatgcccagctaatttttgtatttttagtagagacggggtttcaccatgttggccaggcaggtctcaaactcctgacctcgtgatctgcccacctcggcctcccaaagtgctggtggcacaggcatgagccaccacccccggcctatgtactttttaaatgctgcaattagcttattatgtcattaactgttacatgcattccaatttcaaagatattaaaaggtaaacaaatgtgcatcatagaatcattaaaatatgagtccctaagcactgaaattggaaacaatgcccttgccccaattttttaaaatgtccctgaactgtaaaataaataaacataaggggatttccccaagatgattacttttaagttttatgagggaaaatggtaaatgtcaaattctgtccctaaaccatatctcatctcttttgttcctctgtaagggctgaatcagcctgttgggtgacccaggcctgccctgggggagggaggaaatccacacaactgagtcctttgagcctctcccctgccctgagttcagtagcagctggaaaggggcccagctttatgggggaacaatggtgccagccagcttcgggtgaaacaaggctgaacagcctggctgggtctggcctgggtccagaagagtgccccttgcacctgaggggtccgctccccttcagcaaaggacagatgaagccagggaaagtggagaaagaactccctgggctttctccgtgaacagctctctacgtagaatcccagaatcacccagccagaggacctcagtgtccatggaatcaaactgctccattgtacagatgggaaaacaaaggccccaaagggggctggagcttgcctaaggtccttcagtaagtcagtggcaaagctggagccacagtcaggttccctttaattcagcatgtctaccattaagtgcaagtctgtgcgatcttttgctgttttttgttgtttgtttgtttctgtcttttaaaaatgcccaaattggctgggcgcagtggctcacgcctataatcccagcactttgggaggccaaggtgggtggatcatttgaggtcaggagtttgagaccaggctggccaacatagtgaaaccctgtctctactaaaaatacaaaaattagccagcgtggtggtacatgcctataatcccagctactcgggaggctgaggcaggagaatcgcttgaacctgggaggcagaggttgcagtgagctaagatcacgccactgcgctccagcctgcgtgacagagagagactcctactcaaaaaaaaaaaagaaagaaaatgtcaaattatgttgcttgtacaaaatgtctgtctgacacatcagatagtgtctgactcacctgcccattggaatgagaagctcaggatctcaagcatgaatgcctccaggatagaggagacctgtgggtacatgcctgcccctactccttcaaactaatatttactgtgacatagtaacttcctggcttcaaagctcacctctaacgcttcccatgtatgtgaccttgggcaaattacttatcatcgtggtagtggcctccaagatggccctcaatgattctctcttcctacataaccaccaggctactgcagaaacaggtgtgacttctgaggccaggtcagaaaagacaatgcaaggctgggcacagtgtctcatgcctgtaatcctagcactttgggaggctaaggtgggaggatcactggagtccaggagattgagatcagcccaggcaacatagccataaaacgagacctcacctctactaaaaagagaaaagaaaattagcacctgtggtctcaacctacttgggaggctgaggtgagagaatcgcctgagcccaggaagtcaaggttgcagtgagctgagatgacaccactgcattccagcctgggcaatagagcaagaacctgtctcaaaaaataaaaacagccaggcgcagtggctcatgcctgcaatcccagcactttgggaggccaaggcaggcagatcacgaggtcaggagttcgagaccaccctgaccaacatggtgaaaccccgtctctattaaaaatacaaaaattaaccgggggtggtggcacgtgcctgtaaccccagctactcaggaggctgaggcaggagaattgcttgaacttgggaggcagagattgtagtgagccaagatcgcaccattgcactccagcctgggcaacagagcgagactccgtctcaaaaacaaaaccaaacaaaaaaacaaagagactgcagcttccatcttgctctcttggatcacttgccctaagggaacttagctgctatgttataagcacactcaatgttatatgctatgttataagcacagcccaatgcagggacacacacagcaagaagtaactgagactgcttgccaacagccaactgctttgccagccgtgtgcacgggcccgcttgaaactgtatcctccaaccccagtccagcttccagatgactgcagccctggtcaacatcttgaaacttatgagatgtttctggtgagaatcactcaactaatcagctcctgaattccttgcctatagaaaatacctgaggtaataaatgtttattgctgttttaagctttgtagttttggggtaattcctgacacagccacagacaatgaatacaatcacactttgcctccttttccttaaaatgaggatgatgggaggacttgctttatataatcatgaggattccatatgatacatgaaaagaatctggctaagctgggtgcagtggctcacgcctgtaatcccaacactttggtagcccaaggtaggtggatcgcttcagcccaggagtttgagaccagcctgggcaacacagtgaaaccccgtctctacaaaaaatacaaaaattagctgggcatggtgatgtgcgcctatagtcccagctactcgggaggctgaggtgggaggatcgcttgagcctgggaagttgaggctacagtgagctgtgattgtaccactgcactccagcctaggccacagaacaagaccctgtctcaaaaaataaataaaccaataaataaaaataagaagagtctggctcatagcaaatgcacagcagataggaaccaatattgctgtattattatatggtctccactaatcaagaggagaggttgagagctatatgaggaagggccaaaaggaaagatgaagtagcaacccccagtctcttcattttcctggcaattcagctctgactacattttcatagaacctcctaagacagaagccccatggggaaacttgatctccctagaaggcagtgtagggactatttatcactctgcaagcattccccttcgggtgctcagtcttcatcatccccaccactagaacttatcaactaatttcttgcttatctactaggagtccccagtcaacagaattgactccatctcagcactttccagggacattcccaacctctggaagctatccaacaaaggcttcctttgctccttaatttatctctgagaagcaggtttaaattttagctctgctgggttgggcacagtggctcacacctgtaatcccagtgctttggggaggatgaggcaggcagatcacttgaggtcaggagttcaagaccagcctggccaacatggggaaaccccgtctctaccaaaaattagctggtcctgtgatacactagcctgtagtcccagttactcaggaggctgaggttagaggatcacgtgaccccgggaggtggagattgcagtgagctgtgatggcgccgctgttccctagcatgggtaacagagtgagaccctatctcaaaaaaaaagacctaaacaaaaattttagctctgctaccgatttgtcctttgtcaagttactcaaccccttgagcctcatctcctcgtctgccaagcagaaatagcgaatatttgcttccgggttgttgggggaagaaaatgaagcaagacagcaaggtatgaatgctttattggatggaaataataaattgtcaatgcctccggactctcaggtgctgctcaacgccctgccctgccccaggaagcttctccccacagcggaagccacttagctctcacatgcaggctctgccctgtgctgggcttgacaccaactttggtggtttttgtttttgttttcaagatggagactcgctctgttgcacaggctgaagtgcagtggtgtgatcttggctcactgcaaccgccacctcccgggttcaagcaattcttctgcctcagcctcctgagtagctgggattacaggcgcccgccaccatgcctggctaatttttgtatttttagtagagacagggttttaccattttggccaagctggtcttgaactcctgacctcaagtgatccacccacctcagcctcccaaactgctgagattacaggcatgaaccaccaggccaggcctctgttttttttgtttgtttgtttgttttggtttttttttttgagacaaagtctccctctatcacccaggctgtatgtagtgcagtggcacgatcacagctcactgtaacctccacctcccaggttcaagcgattctcgtgcctcagcatactgagtagctgggaatacaggcttgcgccaccgcatcctgctaatttttgtattttttgtagagacggggttttgccacgttggccaggctggtctcgaacttctgatctcaggtgatccacccgccttgacctcccaaagtgctgggattacaggcatgagccaccactcctggcagctttgttttttaatcagggaactttttttttttttttttttgagacagagttttgctcttgttgcccaggctggagtgcaatggtgggatcttagctcaccgcagcctccgcctcccaggttcaagcaattctcctgcctcagcctccggagtagctgggattacaggcatgtgccaccatgcccggctaattttgtatttttagtagagatggggtttctccatgttggtcagactagtctcgaactcccgacttcaggtgatccgcccgccttggcctcccaaagtgctgggattacaggcgtgagccacagcacctggcttaatcagggaactttaaccagattttatctctttcatcaggggttcagcagtaactagcatatgtgcctgactgaatgcctccttcttatgaccaaggccagcttaagataaattatttttattcctatttatttatttattatttattattattactttttgagatagaatctcactctgtcgcccaggctggagtgcaatggcgcgatctcggctcactgcaacctccgcctccagagttcgcgccattctcctgcctcagcctccagagtagctgagactacaggcgcccgccaccacgcccggctaatttttagtagagacggggtttcaccgtgttagccaggctggtctcgatctcctgacctcatgatctgcccacctcagcctcccaaagtgctgggattacaggcgtgagccaccgcgcccggcctatttatttatttttgagaagtggtcttactctgtcacctaggctggagtgcagtagcgtgatcatggctcactgcaacctcgacctcctgggcttgagtgatccacaccactgcactccaccctgggctacagagcgagactccgtttcaaagaaaaaaaaaaaaggaagaaagaactcagggttggcagaacaagctgtagtgtctctgccttgcatcctggcatctcctctggcctgactccccagggtgattttaggagttgttcctacctatgcatagctcccaatactatggctttgcccctcatggagattctgtgagccacccaacatcctgtaataactctttcctgtttaaactgaagtgagttggtttgttttgtttgcaactaagaatcttgattgacacactgcataacaactctatcagtatgtgtaccatttgtattattttgaaataattttttatttaattagttttttaaagtaatgacagtcacttgtgaagccaccatcccaaaataaaatgtagaaccttaacaataacctacatctgactatatacctccctccccacccaacctctttcccaaccctagtaaccatcctcctgaaccttatgctcatcattccctgttgcacattatttttaattttctgttgaaatataatatacatataataaactgagcaaatattaagtgtacaattcaaataatttatgtgtgtgtatagatttttgtgtaaccaaatcaacatataaacatttcccgccaggtgcagtggctcactcctgtaacgccaacactttgggaggccgaggcgggcagatcacctgaggtcgggagattgagactatcctggctaacccagtgaaatcctgtctcttttaaaaatacaaaaaattagccaggcgtgttggtacatgcctgtaatcccagctactcagaaggctgaggcaggagaattgcttgaatccgggaggcggaggttgcagtgagctgagatcgcgccattgcactccagcctgggcaacaagagcaaaactccatctcaaaaagcaaacaaacaaagaaacatttcccatcccctagaagcctctcttgtgatctctcccagccaattcctgacacttgagagttaccagtattcttacctctgtcaccctaggtttgttttgcctgttcttttgttctttttttttttttttttgagatggagtctcactctgtcacccaggttggagtgcaatgtacaatctcgcctcgctgcaacctctgcctcctgggttcaagtgattcggtgattctcctgcttcatcctcccaagtagctgggattacaggcttgtgccactacgcccagctaattttgtattcttagtagagatgacgttttgccatgttggtcaggctggtcttgaactcctgacctcaggtgatccgcccacctctgcctcccaaagtgttgggattacaggtgtgagccaccgcacctggcctgttttgcctgttcttaaaacatttaaacaaagtaggcctggcacagtggctcatgcctgtgatcccagcaacgtagggtatattttagtacaaggcggaaggatcacttgagctcaggagttcaacaccagcctgggcaacacagcaagaccttgtctctacaaaaactttttaaaaaattagccagatgtggtggctcacgcctgtagtcccagctacttggggtgggctgatgtgggaggatcacttaaagccaagagtgcaagggtgcagtgagctatgatcacacactgcactccagcttgggtgacaaagagagatcctgtttcaaaataaataaataaataaaatagtaaagtatattttttatggtatgcatttttttggtctggcttctttcactatcattatgtttctgtaattctcctgtttttgcaagtagcaatagttgttcttgtttttttttctttctttttttttctttttttgagatggagtatcgctcttcttgcccaggctggagtgcaatgaatggcacgatctcggcccactgcaacctccgcctcctgggttcaagtgatactcctgccttagcctgccgtgtacctgggattacaggcgtgcaccaccacgcccggctaattttttttttgtatttttagtagagatggggtttcatcatgttggccaggctggtctccaactcctgacctcaggtgatctgccccccttagcctcccaaagtgctgtgattacaggtgtaagtcaccaggcctggcctcatatttttctttaaattgactcacttcatttattttatttaatttatttattcattttattttattttatttttgagacggagtctccctctgtcacccaggctggagtgcagtggtacaatcttggctcactgcaacctctgcctccctggttcaagtgattctcctgcctcagcctcctgagtaactggaattacaggtgcccactgccacgctcagctaatttttgtatttttagtagagatggggtttcaccatgttggccaggctgctctcgaagttctgacctctggtgatctgcccaccttggcctcccaaagctctgggattacaggtgtgagccacctggcctttttttgtgtttgtttttttttggggggggacatggtttcactctgtggctggaagtgcagtggcatgatgatggctcactgcagcctccacgtcctaggttcaagcaatcctcctacctcagcacccccacccctgagtagctgggactacatgtgcgagctaccatgcatagctaatttgtttttattttttgtagagacagggtctcactatgttgcccaggctggtttcaaactcctggcctcaaggaattctcctgcctcagcctcccaaagtgctgggataacaggcatgagccaccttgccaggctatttattttcttttttctttttgagatggagtgtcactctgttgcccacgctggagtgcagtgccgcaatctcggctcactgcaagctccgcctcccgggttcacgccattctcctgcctcagcttccccagtagctgggactataggcgcctgccaccatgcctggctaattttttttttttttggtttttgtatttttagtagagacagggtttcaccgtgttagccaggatggtctcgacctcctgacctcgtgatctgcccgcctcggcctcccaaagtgctgggattacaggtgtgagccactgcgcccggcctattttctaaataaaatagtttgaatactaatcatattcgtacatatgcctcattctttttttttttcccccgagacggggtcttgctttcttgcctacgctggagtgcattggctccatcttgtctcactgcaacctccgcctcccaggttcaagcaattctcatgcctcagcctctcaagtaggtgggattacaggtgcccaccaccatgcccagctaatttttgtatttttagtgaagacggggtttcaccatgctggccagactggtctgaaactcctgacctcgtgatccgtctgcctcagcctcccaaagtgctaggattacaggtgtgagccactgtgctcggccttttaaattttttcttcagatggtatctggccatgttgcccaggctggatttgaactcctgggctgaaactctcctcccgctgatagatgcaggaggcagataaggggaaggcctgcctgtacactggaagaacagggtggagccacaggaagttcgagctggatgcccggagagtagcctagcctctccagttcctgtgtggtggcctggtaatcaatttgctaggtaggggcccgttagcaggatcgcctctcgcctctcactttgctgagagtttttttcttttttccttttcacccagtgaattccattctcctcacccttcaatgtctccactttcctaattcttcctggttgtgtgacaaggacctggttttagctgaactaaggagcaaagttctcaacacctttgcctcctgagtagctgggattgcaggcttatgtcactatacctgccaccttcttcttctttttttttttttagttcctgcatagtttttctagtaccataatttatctagtcctctactgttgaacattgaccttatttccaatgtttacctattacaaacattgttatgacaaataaccatgttcatcagttattttgttcattgcacatttatctaagagataaatttttagagatgaaatggctaggaaccactggctggtttttcttttcttttcttttcttttctttttttttttttggcggggagggcagacaatcaacgttcccaggttgaagcctttttttttttttttcttagacagggtgtcgctctgtcacccaggctggagtgcagtggcaggatcatggctcactgcagccttaacctcctgggctcaaccaatgctcccatttcaacctccagagtagctgggacggcaggcacataccagcacacccagttaatttttgtgtattttatagagactggggtctccctatgttgcccaaactggtcttgaattcctgggctcaagcgatcctccctccttagcctcccaaggtgctgggattacagatgtgagtcacggcgtttggccgaggccttatatttgaagacatctttattttattttatgtattttattttatttttgagatggaatcttgctgtcgccgggctggagtgcagtggcgcaatctctgctcactgcaagctctgacttcctggttcaagcgattctcctgcctcagcctcccgggtagctgggattacacgcacgcaccacgcccagctaatttttttgtatttttagcagagacggggtttcaccatgttggccagcatggtcttgaactcctgaactcatgatccgcccccgccttagcctcccaaagtgctgggattacaggcgtgagccactgcgcccagccttgaagacatctttatagaggtataattgccataccataaaatgcacacacttttagtgtataattgaatgatttatagtaaatttattgagttgtacaaccaccatgaccagaaaaaacaaactcagtttctcccactatactcacaacaggcctctgacacaagatgtataggggttttccccacacatcaggcaatcagtcagttctgcagtggacaccagctgggtgttttctagtccaaataaactctgatactatccacctgaaaataacaccaggtcccataggttgagtgctcagtccccaagactatcctcacttcagatgccagtaataagtccaggcctccagaacttcaaactaaccagccataaatcaggattcccacaactccctccctgggttccattaatttggtagagggacttacagaactcagggaaacatatacattacaaacgctacaaataaacagccagatggagagaacaaagggtaaagtctgaaagggtctggagcacgggagcttttatccctatggagatggggtgtcacctcctcctcctgcgtgtggatgtgctctcattcaccttcctggaagcctacaggtgttcagctatttagaagctctctgaacccagtcgctttggtttataatggaagcgtcaggctgggcccagaggctcacacctgtaatcccagcactttgggaggcctaggcaggtagaccacctaaggtcgggaattcgagaccagcctggccaacacggtgaaaccccatctatattaaaaatacaaaaattagctggttgtggtggcaggtgcctgtagtcccaactacttgggagattgaggcacaagaattgcttgaaccttggaggtggagattgcagtgagctgagatcacgccattgcactccagcctgggaaacagagtgagactcttgtctcaaaaaaaaaagcatcattaggtaagcatgattgataaataattggccattggtgattaacttcacttagagaccctccctggaggttgggggtggggctgaaagtttcaaccctttgaactaatggttggatcctctggcagccactctcccatcctgtggttatcttggaactttccccgaatcctgtcattaacataaattctgccgggcgctgtgtctcacacctgtaatctcagcactttgggagaccaaggcgggcggatcatgaggtgaggagattgagaccatcctggccaacatggtgcaaccccgtctctactaaaaaaaaaaaaaaaaaaaaaaaaacaaaaaactagccaggtgtggtggcacgtgcctgtaatcccagctactcaggaggctgaggcacaagaatctctttaaccagggaggcagaggttgcagtgagtggagatcgcaccactgcattccagcctggtgacagagcgagactccctctcaaaacaaaacaaaatataaactcaagtgtgtttgaaaagggattgttttaaataacaatatttttatctttcaccttctggcactgaagctattccaagaggggtttcaaagatctaggacaaaaggccaaatattttaacaaaagattttttttttttgagacagagtctcgctctattgcccaggctggagtgcagtgatgcaatctcggctcactgcaacctccgcttcctaggtttaagcaattctcctgcctcagcctcctgagtagctgggactgcaggcatatgccaccgcacccggctaattttttgtgtttttagtagagacggggtttcaccacattggccaggctggtctcgatctcctgatgtcatgatccgcctgcctcggcctaccaaagtgctgggattacaggcatgagccactgcgcccagccaacaaaatatattcttattgctttagatacttcccttatcccccaagttggattaaatgctagctctagggctgggctcagtggctcacgcctgtattcccagcactttgggaggccaaggcaggtagatcacttgaagtcaggagttggaaaccagcctggtcaacatggtaaaacctacctctactaaaaatacaaaagttgctgggctcagtggctcacgcctgcaatcccagcactttgggaggccgaagtgggctgatcacgaggtcaggaatttgagaccagcctggccagcatggtgaaaccctatctttactaaaaatacaaaaattagccaggcatggtggcgtgtgcctgtaatcccaggtacttgggaggctgaggcaggaggatcgcttgaatccaggaggcagagattgcagtgagccgatatggcgccactgcactccagcctggccaaaagtgtgactttgtctcaaaaaaaaaaaaaaagtggccgagcgcagtggctcacgcctgtaatcccagcacttgggaggccgaggtgggcagatcatgaggtcaggagttcgagaccagcctggccaacacagtgaaaccccatctctactaaaaatacaaaaattagctgggcatggtggcaggcacctgtaatctcagctactagggaggctgaggcaggagaatcgcttgaacccaggaggcggaggttgcagtagctgagatcgcatcactgcattccagcctgggtgacagagctggactgtctccaaaaaaaaagtgctgttccatttggaagtcaaggctgatgccacctaagtgggttcctgctatcctgctacaaggaacttgaagacatcctctttcttcattggcaggacatcaagggctctggacattgtgaaagtttcccttgaagttacaatgggaatccagaacaacgtcacatggacccctccatgggtaacacagaaagcaaatggtgtcttttaagatacagaaaaatttgaattttgatggtttcattgaccaatttttccttttatagattaagcttttgttgtcatatctaagaaatctttgcctaacccaaggtcttgaagattttctcctatgtcttttttttttttttaagacaaggtctcattctattgcccagactggagtacagtggcaggatcacagctcattgcagcctcaacctcctggtctcatgcaatcctcctgcctcagcctcctgagtacctgggactacacacctgcaccactatgcacaaataattttttattttttgtagagatggggtcttgctatgttgcctatggttgtccacaactcctggatacaagcaatccttccacttcggcctcccaaagtgctgggattacaggcatacgccactgtgcccagtcctgacatatatttttaaaattttcatagatacagccaaattgtccttccaccacacaattggcatcacgtcaatttatactccaatcaggagtatggctgtttctcacttgcttggtaacactgttgagatagcaatttttttgttcctgaccaatctgatagtgaaaacatggcatctcatagttttaatagctaaaatcctactttagccacatcctaagcaatatgtgtgaaatgaccagctcgatgcattagccacccactgcttcagtatatacattactaaggaatgcaactgctaagataaaaagctaccacacaatctattgaaatactgacagaagaaattatatgatgtctgggatttgctttgaaataagccatcaatggaggtagtagatgaaactatttttctttctttttgagaccaagtcttgctctgtcaccaggctggagtgcagtgcatgatctcagctcactgcaacctacgcctctcaggttcaagccattctcctgcctcagcctccctagtagctgggactacaggcatgcgccaccacgcctggctaattttgtattttcagtagagacagggttttactatattggccaggctggtcttgaactcctgacctcaagtgatccgcctgcctcagcctccccaagtttgggattacaggcatgagccatcgcatccagccttttcttagagatgagggtctctttatgttgcccaggctgatctccaactcctgacttcaagtgatcttctcacctcagactcttaaagtgcttggattacaggtgtgaacaaacatgcccagtctgaaaactattgttactggtatttgaagcttatgacactagaaattcattatactgttttctcttttcttatctatctctgatatttttcacaataaaaacatatttttaggctgggcacggtggctcatgcctataatcttagcactttcggaggctgaagctggcagatcacttgagcccaggagtttgagaccagcctgggcaacatggcaaaaccagtctctatttaaaaaaaaaaaaaaaaagttatttatttattttttgagatggagtttcactcttgttgcccaggctggagtgcaatggcgcaatcttggctcactgagacttccgcctcctgggttcaagcgattctcctgccttagcctcccgagtagccaggattacaggcgcctgccaccacacctggctaatttttgttatttttagtagagacagggttttgccatgttggccaggctgctcttgaactcctgacctcaggtgactcacccgcctcagcctcccaaagtgctgggattacagatgtgaatcactgtgcccagcaaaagttgttttaaatgaccatttatggcaccacctaaaatcatcttgtgtacatctgtcactgcccaaccccttgaaagatgttggtttaaaggttcagagtgagggctctaggtcgggccgatcaaatgtgaatcctgattccatcaattactagctgatctcagggaagtcgcctaaccactctgggatagttgcctcagctgaaaaatcaacattaccgaaccaggttcgttctgcctgttgcacagtaagccaatcactgagatgataagttttgcagccaataaagagattattcacaaggcagcccagtgaagagataggagaacatgtctgaaatctgcatctctgaaaacagggtttagggatgtttatgggataaagaagcaaggtggtccaaggtgtagggaaaggtgattggaggtaaagaaaagtggggccattggtgatctgtgcaagccagttaagctttatggttcataggatgcatgttcagaaaatgacatcattagtacgatctaaggatggactttagggctttttggcactctaacattgaaaggtcacccatcagatactcaagcaggccgaggtgaagggtcggtgggctcagccatcttgaactggataagaactgactgtgagttcctgaaaaacaacttaagcaaccactgtcacagtgacctatacatcagagatgttatctataaggaagttgtggaagtctagttatatactgcttagctatgtgacttttagctatataggttttaaaatcaactagaagcaagtgactaaaaggaaacaaatcaaagcatgatataagctgattctttttttttttttttttttttttttttgagacagagtgttgctctgtcgcccagactggagtgcagtggcgcgatctctgctaaccacaagctccacctcccgggttcacaccattctcctgcctcagcctcccaagtagctgggactacaggcgcccgccaccacgcccggctaattttttgtatttttagtagagatggggtttcattgtgttagccaggatggtctcgatctcctgacttcgtgatctgcccgcctcggcctcccaaagtgctgggattacaggcgtgagccacagcgcccggcctgataaaaatttttaaaaggaaagaaaagaaaagcaagtaaggcaggttaagtttgtttgtttgtttttgagactgaaatctccagtgagaactttaggcaagaaattattcaggtctgtaatttgtagagataggccagtggggctttcctggaagaaggataactttaggtttgagaacaagaaaagaaggaactgaggataatgagcaggactagaagaagctctgacatgctgattattatctaaggctgttctttagtcttgcagttgcccctctgaagctcaaatctccccaaaattgcagggggatgtgctgagagctccttatggtgatctatttttataactttttttttttttgagatggagtcttgctctattgcccaggctggagtacagtggcgtgatcttggctcactgcaacctctgcctcctggattcaagcgattcttctgcctcagcctcctgagcagctgggattacaagtgcgcgccaccatgcccagctaatttttgtatttttagtagagacagcgtttcaccatgttggtcaggctggtcttaaactcctaacctcgtgatccgcccacctcacctctcagattgctgggattataggcgtgagccactatgcccagactttttctttctttctttctttttttttttttttgagatgaagtcttgctctgtcacccaggctggagtgcaatggcgcgatctcggctcactgcaacctccgcctcccaggttcaaatgattctcctgtctcagcctcccgagtagctgggattacaggcatggtatgccagggtaatttctgtattattagtagagatggagttttaccatgttggccaggctggtcttgaactcctgacctcaggcgatccatccacctcaggctcccaaagtgttgggattacaggcatgagccactgtgcccggcctataactttttttttcctacttctaattcagtatagaaaatttgaaggatacagaaaaagagactcttcctatcattgattcaggaagaggcagttgtgatgaagttgaaagagacaatcctgagttccaatctcagatctgtttcttgcattcactgtgaattttggccagtcactttagccttctgaacctgtttcttcctctatgaaagtgggaatcacagtgactcctacctcactgggtagctgtgggatgaataaaggcacatctagttcataaacacacggtgggcactcaatatatgtccttgtctcctcctttctgtttacagagaggtttcattcaagcatttcctgagcacccttaaggtgtcactacgtgccagaagacacatgagtatggacaagactggctctttctccttgaaaggcttatggatagtccaggctcagcgactcacgcctgtaatcccagcaccttgggaggctgaggtgggcagatcccctgaggtcaggagttccagaccagcctgaccaatatggagaaaccccttctctactaaaaatataaaattagctgggcgtggtggtgcatgcctgtaatcccagctactcaggaggcggaggcaggaggatcgcttgaacccgggaggcggaggttgcagtgagccaagatcgcgccattgcactccagcctgggcaacaagagcaaaactccgtctcagaaaaaaaaaaaaggcttatggtttggggagggaggaaggaggaaatcttcccagattaaatggtccaaactcctgcctcaagataaattaaaaaaaaaatacatttgacctcaatttccagatgtcagcagaggcccagagaggcaaggtcacatggcaaataaatagtaggaagggaacttgaacccgattaggaggaatattgggaaaagagcaaggaggaaggaactttgtaaataaagtcatgctagtttgtagcccaaaaaagaggaacaatagaagatggagctggctgcaaatggatcagggactggaaattcatctatgaaaatcgactgcattttttttttttttgagatggaatcttgttctgtcacccaagctggagtgcaatggggtcatctcagctcactgcaaactccgcctcacagattcaagcgattctcctgcctcagcctcctgagtagctgggattacgggctcatgcccccacactcggctaatttttgtgtgtttagtagagatgaggtttcaccatgttggccaggctggtctcgaactcctgacctcaagtgatccacccgccttggcctcccaaagtactgggattacatgcgtgagccactgtgcccagcctttttgggtttttgtttatatgtttgtttttgagacaaagtctcactctgtcacccaggtttgagtgcagtcgggcgaacatggcttattgtagccttgacctcctaggctcatttgatcctctcccctcagccttttgccaacacagctggctaatgtttttattttagtttagtagagacagggtcttactatgttgctcaggcttgggctgcattttgcttgtgcaagatttcctcccaatactatattatgaaaattttcaaacatataaagcagttgaaagaactgtatagtgaatgctcatctacccattacctagattctacaattgttaactgtttgctacatttgctttgttgcatatttattcattcatctgtttctccatctctcctcccatccatcttactattatttttttgagacagagtttcactctgtcgcccaggccagagtgcagtggcatcatttctgcttaccgcaaccttcacctcccagtttcaagcaatccttctgcctcagccacccaagtagctgggattacaggcatgtggcagcaagcccggctaatttttgtgtttttagtagagatggggtttcgccatgttggccagcctggtcttgaactcctgacctcaagtgatacacctgcctcggcctcccaaagagctgggattacaggcctgagccaccgtgcctggcctgtttatttattttttgagagagagtatctctttattgcccaagctggattgcagtggcaagatcaaggctcactggagcttcaacctccagggctcaagcagttctcccaccccagcctcctgagtagttgggactataggcatgagccattacacccagctttttttttttttttttttttttttgagacagagttttgctctgtcgcccaggctggagtgcagtggtgtgatctcggctcactgcaacctccgcttcccaggttcaagtgattctcctgcctcagcctcccaagaagctgggattacaggcgtctgcccccatgcccagctaatttctgtatttttagtagagacagggtttcaccaggttggccaggctggtctcaaactcctgacctcagtgctaggattacaggtgtgagccactgtgcccagtcccatctaatttttttgatttttgatgcatttcaaagaagttgcagagttcactacctctaaacacttcagcatgcctatcattaactacaatttactatttgtttctgaatttttggggttttgtttgtttgtttttgagacaaagtcttgctctgttgcccaagctacagtgcagtggcgagaccttggctcactgaaacctccacttcccgggttcaagcagttctcctgcctcagcctcccgagtagctgggattataggcacctgccaccatgcctggctagttgtttggtatttttagtagagatggggtttcaccatgttggtcaggctggtcttgaactcctgacctcaggtggtccatccgcttcggcctcccaaagtgctgggattacaggcgtgagccaccgtgcctggcctaggtgggtttttgttttttgttttgttttgttttgttttgtttgagacagagcctcactctgttgcccaggctggagtgcagtggcacaatttcggctcactgcaatctccacctgccaggttcaagcgattattgtgcctcagcctcccaagtatctgggatcgcaggtgtatgccaccacacctggctaatttttttttttttttgtatttttagtagaaacagggtttctccatgttggccaggctggtctcaaactcctgacctcaagtgatccgcccaccttggcctcccaaagtgctgggattacaggtgtgagccatcgaggctggcctaaatgttattttttattttacctggatggtcctaggaggcatttaactttattacccctgatctagaaagtgtattataaagccttggaagtagagttgccaaataaaatatagaatgcccagttaaattttaattttagataaacaatgagaaaaattttagtaatagtatgttacatgcaatagctgcacatatttatactaaaaattatctgttgtttatctgaaattcaaatttaactgggcattctatatatttattttctaaatctggcaacctgggaccacggacagaacttgtgtaccttatttcaaggagaagtaaacattcttaaacagaaataataagccatcacacctagccttaagtggtctctttggatccagatctcaggccctcagaagtctcgtggtgtcttctctccattaacacacagtttttcaaaccttcctctggcaagtgaaagcaaagaggctccaggaaagagggggacagcagtatgactaagtgttctgcagggaaatctggtaagaggcaggtggcatgtgggccgctggggtttttctcccaactccttccagctctgcatccctgcttcctgccctcctcctctcctaggaggcctaggaacctccttcccttgctggtgacaggctcctccaggtttctggcccctgctttagcagggctagtcctgtcctggattggcacaggtgtcataggcagaaggaaggtaaaggtggctcagttttatcaaccactgatcctgcattctgaccaggccaagaccaggctgagttctggatcagggaacttgggagctagaaccacatagcatgggagaatgaggaaatggccaggctgggattccctgccctcacaaactcggcttcttcttggacaatcaccaactacaaacccgggatgttctagaatctttacaacatcctaggaggtaggttctattagattcatttagagatttggatactgaggttcaggtgactttgcctaagaacccctgcccccccgcccccaccccacaagcaatttattgacataataaggactagatccttgatacatatgccgctgaagccgaaattactaactcctgttagatgctgcctcgcagatgagagctgacccatcctgttggcattagtaagaaggttaggatagcatagtccagtggttctcaaagtatcatgctaggtgggcatcagcattacctggaacttgttagaaatgtaatttctcagctcggcgcggtggcccatgcctgtaatcccagcactttgggagtcccaggcaggtggatcacctgaggtcaggagttcgagaccagcctagccaacatggtgaaaccctgtctctactaaaaatacaaaaaattagctaggcatggtggcgggcacctgtaatcccagctactcgggaggccgaggcaggagaattgcttgaaccccggaggcagaggttgcagtgagccgagatcacgccattgcactccagcctgggcaacaagagtgaaactccatctaaaaaaaaaaaaaagagaaatgcagtttctcggtcctaacagagcttcttgactcagaaattcctgggtgacacctagcaatctgagttttatcaagtccttcaggcgattctggtgcactataaagttttagaatcattgatatgtagtagaaagagatgccttttttttttttttttttttttttttttttttgagatggagtctcactctgtcacccaggctggagtgcagcggcacgatctcggctcactgcaagctctgcctcccaggttcacgccattctcctgcctcagcctcccgagtagttggaactacaggcacctgccaccacgcccagctaattttttgtattttttagtagagacagggtttcaccatgttagccaggatggtctcgatctcctgacctcgtgatccacccacctcgtcctcccaaagtgctgggattacaggtgtgagccaccgcgcccagctggagatgcattttttaaacaaaatgagtttcatttatttatttatattactattattagagatggagtctctctgtgttgtgcagggtggtctagaactccttacctcaaaggatcctcctgcctcagcctcccaaagtgctggaattatgggcatgagacactactcctggccaatatccatttaaaacatatatttgggaccgggcatggtggctcacacttgtaatcccagcactttgggagactgaggccagtgaatcaccagaggtcaggagttcaagaccagcctggccaacatggtgaaaccctgtctctagtaaaaatacaaaaaaattagctgggcatggtggcaggcgcctgtaatcccagctacttgggaggctgaggcaggagctaagattgcgtcactgcactccagcttgggcgacagagcaagactctgtctcaaaacaaaaaaatatatatttagaggctgagatgggaggattgcttgagcccaggagtttgaggctgctatgatcacaccattgcactccagcctaggtgacagagaccttgtctgtaaataaataaaaatgaaataaaataaaacatgtatttgttttaagtaaacttttattgatgtataatatgaatagagaaaaatgcagaaatcataagtatatggcttaattaattttcacaaagtgagaaagcctgtgtactgtcagaggcttttgaaccagagcaactccatcttgaataggggctgggcaaaataaggctgagacctactgggctgcatttccaggaggttaggcattcttcattctttttttcagacggagtcttactctgttgcccaggctggaatgcagtggcatgatcctgctcactgcaacatctgcctcctgggttcaaacaattctcctgcctcagcctcccaagtagctgggactacaggcgcctgccatcactcttggctcatttttgtatttttagtagagacagggtttcaccatattggtcaggctggtctcgaactgctgaccttgtgatccacctgcctcggcctcccaaagtgctgggattacaggcgtgagaggttaggcattctaagtcacagaatgagaggggtttggcacaagatacaggtcataaagaccttgccaaaaaagaagttagctaaaacccaccaaaacaaagatggcaattaaagtgacctctggtcatcctcactgctcattatatgctaattataatggatcggcatgctaaaagacactcccaccagtgccatgacagtttacagatgccacggcaacatccagaagttaccctataaggtctaaaaaggggagtaaccctcagctctgggaattggccacccctttcctggaaaactcataaataatccaccccttgtttagcatataatcaagaaataactctatccttagaccagcatctcgagccattgctctgactatggggtagccattcttttattcctttactttctttttttttttttagagggagtcttgctctgtctcccaggcaggaatgcagtggcaggatctccgctcactgcaacctctacctcctgggttcaagcgatactcctgcatcagcctcctgagtagctgggattacagacgtgcgtcaccatgcctgcctaactttttttgtatttttagtagagatggggtttcaccatgttggccaggatggtctcaaacacctgacttccagtgatccacccgcctcagcctcccaaagtggtgtgattacaggtgtgagccaccacgctcggcctcctttactttcttttttctttttctttttttttgagatggagtcttgctctgttgcccaggctggagtgcagtggtacgatgtcggctcactgcagcctccaccttgcctcctgggtcctggttcaagcaattctcctgcctcagcctctggagtagctggtattataggcgcacgtcaccacgcccagctaatttttgtatttttagtagaggtggggtttcactatgttggccaggctggtcttgaactcctgacctcgtgatccacccccctcagcctcccaaagtgctgggattacaagcgttagccaccacgcccggcccctttactttcttaataaactcattatcggctgggtgccgtggctcatgcctgtaatcccagcactttgggaggccgaggcaggtggatcacctgaggtcaggagttcaagatcagcctagccaacatggtgaaactccacctctgctaaaaatacaaaaattagctgggtgtggtggtgtgcgcctgtaatcccagttactcaggaggatgaggcaggagaatcacttgaacccaggaggcggaggttacagtgagctgagattgccccactgcactccagccagggtgacaagagcaaaactctgtctgaaaaagaataataaataaataacttgttttcactttattgtatggacttgccccaaattctttcctgcacgagatccaagaaccctctcttggggtctgaatcaggacccttttcctgaaacagtaacaccacccagatcagggcacagaacattattacctatcctgagaggtgtctttgtgccttcttccaggtacaccctcccctcaaagagtaaccagtatcctgacttctaacaccatagactagttttgcctaaccttacatagtttttaaaattgtaggtgaatacagaatctggagctacaggacttagggttagatccctggttcctggctgagtgatcttcaacaagccatttaatttctgtcacactcagttttcttctctgtataatggtcataaaaataccttgtactggccgggtgcggtggctcacgcctataatcccagcactttgggaggctaaggcgggcagatcacaagctcaagagttcaagaccagcctggccaatatggtgaaaccccatctctacaaaaatacaaaaattagtcagtcgtggtggcatgcacctgtaatcccagctgctcgggaggctgaggcgggagaatcgcttgaacccgggaggcagaggttgcagtgagcggaggttgggccactgcactcaagcctgggcgacagagtgagactcagtctccaaaaaaaaaaaaagcaaattctcaggccctgccccagacctactgaatcagaaactctaggagtggcctcagcaacctacagtttaactaactttgcaggcaattctgataagtactgaggtttgaaaaccactgcactagagaaactgaatgaggatggggcgcaggaatctgtattttagcaatctttcctaaggcatgttgcaggaaacatgaagtggttttgaaagtactttgcttgaggcttgaaggcttgaacctaggagtttgattttttattttttttagatggggtttcactctgtcactcaggatggagtgcagtggcgtgatcttggctcactgcagtctccgtctcctgagttcaagcaattctcccaccccagcctcccgagtagctgagattacaggggtgtgccatgcccaactaatttttgcatttttttttttgagacagattctcgctctgtggcccaggatggagtgcagtagcacgatcttggctcactgcaacctccgcctcccaggtccaagcaattctctgcctcagcctcctgactagctgggattacaggcacccgccaccacgcccggctaatttttgtatttttagtagagatagggtttcaccatgatagccaggctggtcttgaactcctgatctcgtgatccgcccgccttggcctcccaaagtgctgggattataggcgtgagccaccgtgcccggtctaatttttgcatttttagtagagatggggtttcaccatgttagccaggctggtcttgaactcctgacctcagttgatccatccgcctcggcctcccaaaccatgcccaacaaatttttgcatttttagtagagacaagatttcaccatgttggccaggctggtctcaaactcctgacctcaggtgatccacccgcctcagcctcccgaagtgctgggattataggagtgagctactgcgcccagcctttatgtttcttttgttgtttgttttttgagacagagtctcgctgagtcgcccaggctggagtgcaatggcgtgatcttgggtcactgcaacctccccctcctgggttcaatcaattatcgtgcttcagcctcccaagtagctgggattacaggcacccgccaccacacctggctaatttttgtgtttttagtagggaaggggtttcacaaggctaggcgtggtggctcacccaactctactaaaaatacaaaaattagccaggcgtgatggcatgcgcttgtagtcccagctacttaggaggctgagacaggagaatcacttgaacccaggaggcgagcggaggttgcagtgagccaagattgcgccactgcactccagcctgggcgacagagcaatactctgtctcaaaaaaaaaaaaaaaaaaaaaaagagacggggtttcaccatgttggccagactggtctcaaactcctgacctcaagtgatttgcctgccttggcctccctaactcctgggattacaggtgtaagccactgaccctagccaagcctaggagtctgagaacagcctgggcaacacagggagtccacgtctctacaaaaataaaaacaattaggatagtgtggtggcttgagcctggagtcccagctactcaggaagctgaggtgagaggatcacttgagcccaggaggttggctgcagtgagctatgattgcaccgctgcactccaggttgggtgacagagcaagactctgtctcaaaaaaaaaaaaaaaaaaaaagtcactttgaaaaatgtgactttccagatggcaaaatactattttcattaggaggaaacaggctaaacagtaatagcaaaggtcactaagtattgagcacttagtcatacctctgagtctctgcctgcatagcctattatttctcacaagcaatccatgaagaaggttaagacaacggactttcacgccagactgcctgggttcttatcaagtatgtgacttagtttatatatttgtaaaatggggataataatggtatttctgtaataggtttgttgtgagaataaagggagcttggtatcagctcttagaataccggacaggccacgttggctccactaagctgttgtcatcatccctaagggcacccagttaaaaggtagaaaagggaggatttgaatccggtcagtgtaactctcaagtgtacattttttttcttttattttctttttaaccacgccctttaatgtacattgttaaaggctaagccaggccaggtgcagtggctcacatctgtaatctcagcgattgggaggcccgaggagggagtatcgcttgagcccaggagctggagaccagcctgggcaacatggcgacaccgtggccctattcccgccccatcccatccgcactccaccccatccccatctctacaaagaatagaacaaaattagtcgggtgtggtggtgctcaactgctgtcccagctactcaggaagcccaggtgggaggctcgcttgagcccaggagtgtgaggctgtagtgagctatgactgcaccactgcactccagcctgggtgaagggtgagaccttatctcaaaaagaagaaaaaaaaagaaaaggaaaagaaaaagaaaaaagaacaactaagttataaactaagctatatagcccattggttctcaaattatgatttcactcactagcagtatcactagacagcttgttggacatgcaaattatcagaccctatcctcctatgccagatcttctgatcagaaactctgggggtgggggtcagcagtgtaagttttaataagctctctaggtgattctgatgcacaccatagtttgagaatcacagtccttataggctctggtgggcggggtgttaaaaaaaaaaaaaagcctggaggtgctgggagccgctcgcgcccatctcacctggagctgaggaaaactgggatttaactgatttaccaccgcagccagctcttcaagccaggggcgggccggacggctggcgcgcaaggcctgctggggcttgtagtctagaccacttccgcgctcaggcgcctgcgctttagctgctaactcgctctagtagctgtggtcggggctcgggaccggctgccatcttagtctagggactgaggagtcgccgccgccccgagtcccggtaaacccccgtgggcgaactcggggcagttctcgggagagggagggagtccggatgagaatgttcggggagaacaagggtagaggagtgggacgcgcggttcgggaccccagagccgcggctgctccttcttccagagccggtgtctgtcgggggcgcggggagctcgggctactggcccgggccgggcggtgggggtgggctgtctggacgttcggagggatcagtgtctggcacaggcttccggaggccttcgcctcgcgggctccaagttgtgaaagggctgggccacgacgggcgtgggtaccgtccggcccctcgcccctcagccccgcctggggccactctccagcggttcggcctacgcgcggggcccggcggcggggccggcgcgggcgacgtggccctgtgaggggcggcggccgggtcccccgccacccagctggccttctcgagacttttccgagcccccagtcgctagaagggcccagcacagcggctgcctccccttctctctcccactcgcctcctccttccattgtccccccggcgtggtggtcccggctccggcgccctccccgacgtccgccaccgtcgtggcggcgccgacttttgcagacgtggagctgtcactgcccttcctccggagagtgcccttttctttagcagagaaaagaaaaaagtagccgttgaacgtattctaagggtcgaagcatgatgacatgacttttaagtggagaactcaagttttccaagacagttcccgtccgcgacagaaaagagaatcgcagaatttgtgcgcccgaagtagacgctgggcctaaagttagttggacatgtaaccaggtgaacttgtaaagggccaggaattcattatccccaataacaacgcaaccttgttttcttggttgtattcgtatcctaatcttattacattttctgccattcttccacagctacagtatacttggtttggagtgggggatggggaattgtgggatttttgccttgaaaattagtaagaccctggagccagccacccacttaggtgggttctcctgcatcttttcctgatagaattcgatcttcaggaagtatgtaaaggcagtgtatttccattctcaaaatcggctaaggaatggtttatcagttgaggtgaagttctcatggcagatctgctgagagcttgctatgtgtatttacaggtttatttaagctacgatttatttttaaaattaagaaatgggccgggtgctgtgtgtggctcacgcctgtaatcctagcactttgggaggccgaggcgggcagatcatgaggtcaggagttcgagaccatcctgaccaacatggtgaaaccccgtctctactaaaaatacaaaaaaaaaaaaaaaaaaatcctgggcgtggtggcgcgcgcctgtagtcccagctactagggaggctgaggcaggagaatggcttgaacccgggaggtggaggctgcagtgagccgagatctcgctgctgcactccagcctgggcgacagagcgagactccgcctcaaaaaaaaaaaaaaaaaaaaagcaatgggatgggtgtggtggctcacgcctgtaatcccagcaatttgggaggccgaggtgggcggattacgtgagcccaggaattggagatcagcctgggcaacatcgtgaaaccccgtctctacaaaaaatacaaagatttgccgggtgtggtggcaggcgcctgtggtcccagatactcaggaggctgaggtgggggaatcacctgattccggggggtcgaggctgcggtgagctgttaccgttgccactgcattccagcctgggtgacagagtgagaccctgtctcaaaaaataaaaaaaaaaatttagaaatgaaggtggaaattctactgcttctttgaactgtgaatttaagttttgtgagtccaaaaggaattccattacattcagcatacaggtcaagtcaccaaggatatcatatgaaattaaaaaaatgagtacagactacttcttcagtgtattctagaatcaaacatttctacattctttagaaaaaaatacatctttttcgtttgtttgagacggaatctaactttgtcacccaggctggagtacagtggtgtgatctcggcttactgtaacctccgcctcccgggttccagcaattcttctgcctcagcctccgtagtagctgggactacaggcgcgtgccaccactcccggtaatttttttgtattttttagtagagatgggttttcaccatattggctaggctgctctcgaactcctgacctcgtgatccacctgccttggcctcccaaagtgctgggtttacaggcatgagccgccactcctggccctaaaaaatacatcttttcacttattgggagaggcagacaaaccagtagtccccaaatttgaccattagaataattaggagagcttagaaattccagggtcttaccttctgagatggatttagtaggtctgggttggcttcaaccaatttatttttaacacatgccttaggtaattctgatggtcttgggaaccactgagggcaaatggtactgtagacttaccaaggaaaggtcaaaaagctttgagacgaaagaggaagtggccaattctgtgtgtgtggctgggtggaggattggttagaagaggcaagatttgcccctgaacccacattgggtcttacatgaagagtaggagtgtgaaaagggcggggaaagagaaggacagggtaggctgagtgaatgccttaatgctgtgtgtaaattcagaggattatggaacaaaaagggttcagggagtgtggagtggaatggggaaggagagcattttgaaacgcaaggtcagaaaggttaaaggaagcaagtatatgaaaagtgattttttgttgttgagactgggtctcacccagtcacgcaggatggagtgcagtgacaggacctccagagctcaagtgatcttcccaccccagcctccctgagtagctgggacaacaggcatgcattagcatgcctggctaatttttaaaatttttttgtagagaaaggttctctttacgttgcccagtctggtcttaactcctgtgttcaagtggtcctcccaccttggcctcctaaagtgttgggattacaggtgtaagctactgtgctctggctaaaaattttaagtataatgctaaaaatttggaattttatgttggtagaaatagatacagggctgggctcagtgcctcacacctgtaatctcaacagtttgggaggctgaggcgggtgaatcgcttgagctcaggagtttgagaccagcctgggcaacatggtgatatcccgtctttaccaaaaggaaggaaaaaaaaaagaaatagatgcagatttttcgacagggaaatgatgtgagtacatatgtgttttagaaaattgctgtgtactgcaggacaaagataggtatcaaaaaacaaaaaaagaaagattgctctggtgatgagcgaaaggatgagggactagctattgcagaagtctagttgagaaatgacaaagcctgaccttggagagaggttgtggggatgatcaaaggattggatttagctttttactagtgcaatattgttgccatatttctagatgaggatttttttttagagctaatctgggtaaagggctccttttctgtcaaaagaacccattagcaagtctgaataatattgccaggttatatatgttatgtatagtatgagagtgaattgttcattagcatctttgagaaattagaaagaactatgtcaggtgtaatttggaagagaacttgaagtttgttattgttactatttttgagatggagtcttgctcggccatgcaggctggagtgcagtgatgtgatctcggctcactgcaacctccacctcccgggttcaagcgattcgtgtgcctcagcctcccaagtagctgcctcccaagtagctggaattagaggtgcatgccaccaagcctggctaatttagaacttggagtttggactgaaatttatgcctctaaaaagtattgatctaggcttgttgggagtgtttttctctcagcctgtagaaacttgctcattgagttttagagttgggagaagttacagagattatctagtccataatggcaaatatattttggtttattggccagctctaattggaagctgccagaagcactgtgtttggaaggattctggttgtaggtgctctgagaaattgtattatggttgatcaatgatgtctcctgtggacagttacctagtaggtagtagacatgtgccaaatatatgctattcttagataagtccaatctcttagttttctgttttgttgttgtttgtttgttttaaaggttaaataatttacctgaaactagttaagagtaagaactagaactagaactgggttttgcaactctgggactggtattctctggtttacaaagatcaatgtgcactactgaagagcttctggtattagactagaaaaagaaaagggagatttttagcctatgcgtcttgactgtttaggcaagagtttaacaaggaattttggcctagaagtaagttttgttatattcattctgtcttaagaaatttgtgttagggccgggcgcggtggctcatgcctgtaatcccagcattttgggaggctgaagcgggcagatcacgaggtcaggagatcgagatcatcctggccaacgtggtgaaacccccatctctactaaaatacaaaaaattagctgggtgtggtggcatgcacctgtagtaccagctacttgggaggctgaggcaggagaaccacttgaacctgggaggcggaggttgcagtgagctgagattgtgccactgcactccagcctggcaacaagaatgagactctgtctcaaaagaaaaaaaaaaaaaaattcgtgttagtactgataggaaatagtcatctgttttgttgttttgccactttctttcttgttgcctaagtctctgttttgggttttggacattggtttcctttataagaattaagacaaaagtatgtaaggtttttttttttgtatttatagtacttagccaaattctgggctcataataagcactcagtaaaggcatgttgacttttatggctgtaaatgatactggctttgagtcaatataaattagttagggggttcacagaattgaattgcagcattctctggttgggaggttggctttcagctaaaaacgttaagttggaaactatcctcacaactagaagcagttaaccagaagctgttcctgcctctatcctcctccagtctagcagtgtactgtccttgaaaaactgctgccagctcagcttttttgcttcttttcagaactgactatatccagatccttggtgtgcgttttcttttcctgtccctaggagtctccaagttgcagggactatcattatggtgacccttataggctggtgtatttatatggccatcctcattttgccagatagccgtcatactcagattggtgtcttcccataatacgtatgaatcattttccctcagttctttcttttgtcctgtctgctccattaaaaattgtctatcccatgaaatttttaaaagagactttgtgcttttagagtcgcaaggtcgttgcagatctgatgtgtttaactatagaggtcagctgggtgtggtggctcacgcctgtaatcccagcactttgggaggctgaggtgggtggatcacgaggtcaggagttcaagaccagcctgaccaatatggtgaaaccccatctctactaaaaatacgaaagttagccaggcgtgggggtgcacgcccgtagtgtagtcccagctactcaggaggctgaggcagaagaatcgcttgaacccaggaggcgaaggttggagtgagccaatatcatgccactgcactctagcctggcgacagagcaagactccatctcaaaaacaaacaaacaaaaaaatatagaagtaatgtgttaatggactctccttcctttctcaggtaccatgcatttcacggtggccttgtggagacaacgccttaacccaaggaagtgactcaaactgtgagaacttcaggtatggtgtcatcctgtgagagaaattgggggcaagagtgatgcagaggccaagctctggtcttatacctgctgtgaggagagagcagtgttgatgctagctgcatcagttggttgaacatataggcagcttcacttggttctgaaacccaaagctgcctctgcagggattagcctgtgagccacactgtgctcttaatttgggttttctgacttttctgtttttgtagatcccttatacatatgcatactttttctatttgtgttgttttatacacgtttatctctgtatactatctagacatgtgcatgtgtaggattaagaggtgggtaatgaaaaagaagacaacatggccaggtgcagtggctcatgcctgtaattccagcactttgtggggcgaaggtgggaggatcacttgaacccaagagtttgggaccagcctggacaacatggcgagaccctgactccacacaaaataaaaaaaaatcagctggtgtggtggcgtgtacctgtaatcctagctgattgggagggtgacatgggaggatcacttgagccaggaggttgaggctgcagtaagccatgatcacgccactgcactccagcctgggtgacagagtgagaccctgtctcggaaaaaaaaaaaaaaaaagacaacatggttcagtgcagaaagaatagaggacttggaaagaaaagatctgggttccgatttgattttgccactgacaagctgtgtgactttcggcgagtt
